United States Patent Application Publication US 2024/0117295 A1 - sequence listing, part 12

SEQ ID NO: 8 - DNA, 3977505 bp, Artificial Sequence (residues 1,988,754-3,977,505 of 3,977,505)
  Synthetic E.coli genome
gtctgggtgatttggggcgtgatcgttaatgcctggtttattccagaaattgccagccagttcttcaccatgggtctggtgattggcatcatcggcgttgttttccgccttaacggcatgacggttaataccatggctagttcctttaccgaaggggcgcgaatgatgatcgcccctgccctgctggtgggtttcgccaaagggattttgctgctggtcggtaatggtgaagcgggtgatgccagcgtgttaaataccatcctcaacagcattgccaatgccattagcggtctggacaacgcggtcgcggcctggtttatgttgctcttccaggcggtatttaatttcttcgtgacgtccggttctggtcaggcggcgttaaccatgccgttactggcaccgcttggcgatctggtcggtgttaaccgtcaggttaccgtgctggcgttccagtttggtgatggcttcagtcacatcatttacccaaccagtgcgagcttaatggcaacgctcggtgtgtgcagggtggacttccgtaactggctgaaggtgggcgcgaccctacttggactgctgtttattatgtccagcgtcgtagtgatcggcgctcagttgatgggctaccactaaaaatgttaagagccgcaattgcggctcttttttcattctgccgtttcagtctctacggcttcatttttggcattgcgcttcatccacaacgctagcgctttcaggctgtctggagtgaactcatcgcagcgtgcggtgatttcttccggcgtcagccagcaaacttcactgacttcatcttcctgtagtgcgaagggaccgtgagagacgcagctgaacaatgcgccccagacacggcaatttttatcttcgaaatagaactgcccgtgctcggcaaaggggacaccggcaatgcccaactcttcttccgcttcgcgacgcgcggattccagcagttgctcatcggcctggactacaccgcctgcggtcgcatctaacatgccgggtaaaaagtcttttgtctcggtacgacgctggaccagaattttgcccatgccatcatgcacgacgatgtaagttgcacgatgacgcagacactgtgcccgcatttgttcccggctggcttgtgcaatgacttcgttctcttcattgacaatatccacccattcagtacttgccaaacgacgctgttccattatcaggaaaccttctttttctggcgctcttacggcgcattttgagttgtgggtaaattacggattaatcgcgacctgcgcaatgatactttgatcattgagtgcgattacactaagtacgtcattatccagcatgccataactcgccggattaccgcctttcggaatactcacgctgccggggttgaagtggaaaatctccccccgctgttctgccactggcagatgggtatgaccgtacaccagcacatcgttctggtttaaagcaggcagattttccgggccaaaaagatgaccatgcgtcaaaaacagacgttgtttttccagtaatacctgttgccacggcgcggttatcgggaaatgcagcagcatttgatccacttcgctgtcgcagttgccgcgcacagcgataaccttatgtgccacttcattaagccgttcagcgactttggctggcgcgtaaccctccggtaaagcattacgcgggccgtgattcaacacgtcgccaaggatcaccagccactgggcaccgctttgggcaaacaactccagaacacgttccgtcgccggtaagctcccatgaatgtcgcttgcaaacatcagtttcatcactcactcctcgtcgaaaaaacgtaagctatgatactggattctgtcgttgctatcagccagattgcttcgcgctaagtgcaataaaacgctggacagacgctcgctgccactggaatgttgcataatccaccaggcgttctggcacctcatcgccatgtagtaccaggcggttaatcattagcgccagatcagtatcagcaatgcaccattcaccaaataaattcggctgacccagtactaacaaatgttctgccatcgcgaacagtttctctgcactggcttttccctcggccgttagtggcgcttttttcgcccccgcaaagacaacatccgtcggacgctcttcgcggatgggcatcagatcgctgcgcagccaggcctgaatctgtcgtgcacgcgcacgattttctaaatcaagcggataaatacgttcccaggtcggtgacgcaaatcgatcttccagatactccgcaatggcagaagattcactcaactcaaaatcatcgatttgtaataacggcacacggcgtgtctgaccgtaaccttgccacgtcggctgcaaatgttcaccgctgtcgaggtcgatggtcttgatatgaaagctcaggcctttttcctgcaacgccacccaggcggataacacataaggggagaaaaagtgggcatcactccaaagcgtgatagcgggtttactcattatgtcctcggcaataaagggggctggctatcaaactatagagcctttttgtcactgtcacgtgacgaatactcacgtaagtcgccgcgctttctatacttgtggtgttcagatgattaaacaaccggagctgcaatgatcgatctctatttcgccccgacacccaatggtcacaaaattacgctgtttctcgaagaagcagagctggattatcgcttgattaaggtagacctggggaaaggcggtcagtttcgtccggaatttttgcgcattagccccaacaacaaaattccggcaattgttgatcattctcctgccgatggcggcgaaccgctaagcctctttgagtctggtgccattttgttgtatctggctgagaaaacaggactctttttgagtcatgaaacgcgtgagcgcgccgccacattacagtggttattctggcaggtaggcggactggggccgatgcttgggcaaaatcatcattttaatcacgcagccccccaaaccattccttacgctattgaacgttatcaggttgaaactcagcgtctttaccatgtactgaacaagcggctggaaaacagcccctggctgggaggcgagaactacagcattgcggatattgcctgctggccgtgggttaatgcctggactcgccagcgaattgacctagcaatgtatccggcagtcaagaactggcatgagcggatccgtagccgccctgccaccgggcaggcactgctaaaagcacaactcggtgatgagcgtagcgatagttaacagaaacaggttctcgtgtattatttcatcctaagtaaaacaacggagaacctgcaatggcacaacctgccgctattattcgtataaagaaccttcgtttgcgtacgtttatcggaattaaggaagaagaaattaacaaccgtcaggatattgttatcaatgtgacgatccactaccccgccgataaagcgcgcactagcgaagatatcaacgatgcgctgaattatcgcaccgtaacgaaaaacattattcagcatgtagagaataaccgtttctctttgctggaaaaattaactcaggatgtgctcgatatcgcacgtgaacatcactgggtgacgtatgctgaagtggagatcgataaactgcacgcgctgcgctacgccgatagcgtatccatgaccttaagctggcagcgttaatcgccatatcgggaggctgcatgaacatagtgatcaccggagggacaggattaattggtcgccatttgattccgcgtttgctggagctgggccatcaaattacggtagtgacgcgtaacccgcagaaagccagttccgttctcggccctcgggtgacactatggcaagggcttgccgatcaaagcaacctcaacggcgttgatgcggtaatcaacctggccggagaaccgattgctgataaacgctggactcacgagcaaaaagagcgtctctgccaaagccgctggaatatcacgcaaaaactggtcgatttgattaatgccagcgacacgccaccgagcgtactcatttccggcagcgcaacgggctattatggtgacttaggtgaagtggtggttaccgaagaggaaccgccgcataacgaatttacccataaactctgcgctcgctgggaagaaattgcctgccgggcgcaaagtgacaaaacgcgagtgtgcctgctgcgtaccggtgtagtgctggcaccggatggcggtattctcggtaaaatgctgccgccgtttcgtcttggcctgggcgggccgattggctctggtcggcagtatctggcctggattcatattgatgatatggtcaacggtattctctggctgctggataacgagctgcgcgggccatttaatatggttagcccctacccggtacgcaatgaacaatttgcccatgcgctcggtcatgcgctgcatcgcccggccattttgcgcgtccccgcgaccgccattcgactgttaatgggcgaatctagtgtactggtattaggtggacaacgcgcgctgcctaaacggctggaagaagcgggttttgcgtttcgctggtacgatttagaagaggcgctggcggatgtcgttcgctgatgtggtttacagcaaacatccgccagttaactcccggtgttacaggattagtggctttgcgcgataagatcgtctggactaagtcgggtcaccatcataactaactctctgtctaaacctctatccagcatctcctgagcaatacgcagggcttcttcgtgtttgccctgcattgcgccttcttcacgtaatctgtcagcaatggtcatcagtttctccttttcttgtggtgcgcgttccgctatctcaccaataaatgcacgaaaacgctgggcatcccctgtttgtaatacgtaattaaacagggcttttagctgtctgtcattagtgttccctgtaactagcaggctaacaatttggtcgactaatcccaacagatcgcgctgacgaatatgtttctgaattaactccaacagcgccattttgcggtgttgcataatctcgtcatccggcaccacggtaatatccaccaacggaaaagcgctactatatattttgcgggctatagcaggctcggcaaattcatcaagccagcagagactataaggataaggacttctgcaaccatgataaaacagcatcgggagcaccaatggaagctctttatagcccgcatcaagatggttttgcattgccgcaatggaataacgcatcatgcgaaaagccattaattcttccggcttactttggtgctctatcactacataaatataacccactccctcctgcgttttcacagaccacaagaggtcggaataatattgccgcaggtcttcatcaataaaactgtttggttccagtttaagcgtcgttaaatcacacagtttgcgcagcggcgcgggaagatgaatatcaataaaatcccgcgcggtgtctggatggcgtaaaaaagatttaaataccgcatcatgcggcgtggaagttgtgcttattgtcatggcgttccgtcacccctcaaatttaagatgacgcgacaataaccacgattaacacccaatgcagcaggcagtttttatctttggacagcgaattcagaagtatttttagcggactgtaacttttacatttcagcggaagctgactcgcaaattccccatgaaaatactccggcagcgttagccaccggagaggaaattatttcaggcttcccttaaggaaccgttgcagacgagggctttgcgggttgccaaataactgctccggcgcgccctcttcttctattttcccctgatggaggaaaatgacatgagtagaaacatggcgagcaaagcccatttcgtgagtcactaccaccatggttttcccctcttctgccagttgctgcataatacgcaacacttcgcctaccagttcaggatcgagcgcgctggtaggttcatcaaacagtaaaacttccggttccatcgccagcgcccgcgcgatagaaacacgctgttgctgaccgccggaaagatgcaccggatatttcccctgcgcacgttcgtctatcccgacttttgccagatacttcaccgcccgctcgcgcgcttcctgcttgctcaggcccaacacctgaatcggcgcttccatgacgttttccagcaccgtcatatggctccagagattgaagtgctggaataccatcgtcaggcgtgtgcgcagtaagcgcagttgatttttatcggcgactttgagttgaccgtctttgtcgcgcaccagattgatcgtctggccattgaccacgatgctcccttcactcggtttttcgaggaagttaatgcagcgcagaaaggtacttttcccgcttccgctgcttccgatgatgcttattacatctccggcattcgcttgcagacttacccctttcagcacttcatgttcgccgtagcgtttgtgcaaatcgataacgtttaatttattctcggacatcgtattctcagtgcgtactagaaggtttcacatgctgcaaccagcgtttttccgctctgcgaaagaggctgatcaggacataagagatgattaaatagagcaccgcggcaatgccgaaggcggtaaaaggttgatacgtggcggcgttaatatcgcgggctattttcagcagatccggcaccgtggcagtaaatgccaacgcagtagagtgcagcatcaggatcacttcgttgctgtatgccggtaacgcaatacgcagcgcagaaggcaaaataatgcagcgatacattttaaaagtgctgaagccataggctctggcggcttcaatttccccatgcggaacgctacggattgccccagcaaaaatctcggtagtgtaagcgcaggtgttaagcgtcagcgccagcacggtacagttcaggccactgcggaagaaagcgttaaggaattcggttcccttaacaatctcaagcgtgtacatgccggaatagaacaccagcaactgaacatacagcggcgtaccgcgaaaaatataggtaaataaccagattggaaactggatgtatttattactggagacacgaccaatcgccagaaacagcgccaggactccgcctatcactacgctcaaaataagcagccacagagtgatcgccacaccagtaaagcgataaccgtcggtccacagcagcggtttccagtattcatgtaagatttcgatcacaggtcagccctcttcacacccacggagtagcggcgctcaaggaacagcagcacaccattggaaacagtggtgaaaaccaggtaaatcacgccacagacgatggcgaaatagaacggttcccaggtacttttgcctgccagttgggtggctttgaccacatcttccaggccgagtaagctaaccagtgcggtagatttgaggatcacctgccagttgttgccaatgcctggcagggcgtaacgcatcatgctcggaaacatgatccgccgaaacacttgcccacgagtaaaaccgaacgccgtcgccgcctctatatgtcctttcggcactgccataaaagcaccacggaacgtttcggtaaaataagcaccgtagataaaaccgagagtgataataccagcgaccatcggatcgatatcaatctgcccgacgcccatcgcctccgtcaccgtgtttagcgcaatctgcaaaccgtagaaaatcagcagcatcaacactaagtccggcacgccacgaatcagcgtggtgtacccttcgaaaatcagcccgctaagccgattttggctgagcttaccgccagcgccaattaaaccgatgattacagcgagcactacagagctgatagccagctccagcgtgacgagcgcaccctgtaaaataacaccactaaacccatacaacatgctgcctgtcctgtcgtgtgtggtgaattaccgcctcttgtctccctccggttacccgaagggagcgggctttctttcaccgatggcgattagccaccataaacatcaaaatcgaagtactttttcgctaatttctcgtaagtaccgtcagcgcgcatttcggcaaaggctttgttcagtgcttcgcgcagttcgttatcttctttacgcaggcccatgccggtccctacgccaaacagtttttcatctttaacagacgggccaccgaatttgtaatctttaccgacaggttgtttgaggaaaccttcgctggcagcgacctcatcctggaacgcggcatcaatacgtccggcagtcaggtcagaataaatgttgtcctgcccctgatagctgacgatttcaatgccttttggtgcccaatgttcattaccgaacgtctcctgggtggtgccctgcaatacgcctacccgtttgcctttcaggctctcgactgtcggctgaatgtcagaatttttcgccaccaccaaacgagaatcggcagcgtacagtttgtcggtgaaggctatttcttgctgacgtttttccgtaatggaaaggctactcatgatggcgtcaatcttcttcgcttttaaggacgggattaacgcatccagcggattttcgacaaacgtacattgcgtattgatgcgtttgcataattcctttgccagatcgatatcgaagccaaccagttcgccttgactatttttactttcaaatggcgcataggtcgggtcggtaccgatgcggatgttttgcggaatcgcagcaaacgccgcagttgcgctggagaaggccagaaccagagagaggcttagcaccagttttttcataatgtcctcaactgacagtctttttatagggaatatttacaggtttgttacacttatcgtgccataaaattgaccatcaaggcaaaatatcccgccccgttagacgtattatttttcattaaaaatgcttaagtatgcatttcaatgcaccacgatagtgcaacaaacctggcgtgcaccatgatgatcattccatcaggtacagcttcccagcgacgtatcagtcaccgtagacattaaagtcgaaatactttttcgccatcttgtcgtaggtgccgtcctgacgcagctcgccaagcgccttattgaaggcagccgtcagttcagcatcatctttacgtagccctacaccggtgccatcaccgaagtattttttgtcttttacactactgccagcaaaggcgaaatctttaccagcaggttgcttgaggaatccttcgctggcagcaacttcatcttgtaacgcagcatccagacgtcctgcagccagatcggaatagaccaaatcctggttggcataggccaccacatccacgcctttactacgccaggtctcgttagcgtaagcttcctgggtacttccctgcagcacaccaacatgtttacctttcagactatccagcgttggctgaatcggactacctttggccgcaatcaaacgagaatctgcggcgtacagcttgtcggagaaggcaatctcctgctgacgtttatcggtaatggaaaggctgctaataatagcgtcgatttttttcgctttcagactggggatcagcgcgtcaaagtcactggcaacccaggtacatttcacctgcatccgtttgcacatctcgttaccgagatcgatatcaaagccaacaaaatcacctttagcatctttgctactgaacggtgcgtaggtggtatcggttccgatacgtaccgtctccggtagcgccgcatagctggaagccgctgtggagagaccgactaacaaagacagagcgagaatgctcttcttcatacataaccctcaagtgaaaatggcttttttatgttgtgtattgtgttgtgtgtttgcaggctctttcatgcaggtcttatgccatcttgacgacaacagtaacattcaacgttaaatatgttaataagacgttgcattattgtcctgaagttgaagatagcaggtatagcggttgaatcgcagcgtttcgattgaatggcagaaacaaaatgtcgaggatttgatcgcggttgcaaaattgccctgaaacagggcaacagcggagttatgcgccctgccagcgggcaaagagatcttcaggaagggttatcgcaaactggtcaagaacacgattaaccgtctgatttatcacatcatcaagggattgcgggcgatgataaaacgccggaacgggaggcataatcaccgcaccgatttctgccgcctgagtcattaaacgcagatggcctaagtgcaatggtgtttcacgcacgcagagcaccaacgggcgacgctctttcagcaccacatctgccgcacgggtcagtaagccatcagtatagctatggacaatgccggaaagggttttgatactacagggtaaaatcaccatccccagcgtctggaaagaaccggaagagatgctggcggcaatatcgcgcgcatcgtgcgtgacatcggctaatgcctgcacttcgcgcagagaaaaatccgtttcgagggataaggtctggcgcgctgcctggctcatcaccagatgcgtttcgatatctgtgacatcgcgcagaacctgtaataagcgcacgccataaatcgcgccgctggcaccgctgatgcctacaatgagtcgtttcataaatagttgccctgtcagacttgcaggcagactttgcaggatttcggcgggagttgcaagtcagggtgccagaccggcaccctcagcgaaggcatcatccttcgttatgcatttcgagattttccacttcgttctgacgttgcactgctttggcgtcatcattacgtaacgtatcgaggaaatcgaggtagccctgatcaacatctttggtgacgtagacgccgttgaacacgctgcattcaaactgctggatatccggattttcagcgcgaacggcgtcgatcagatcgttcagatcctggaaaatcaacccgtcagcaccgatgatctggcgaatttcatcaacttcgcgaccgtgagcgatcagttccgtggcgctcggcatatcaataccataaacgttcgggaagcgaatttccggtgccgcagaagcgaggtacactttcttcgctccggcttcgcgtgccatctcgataatctgctcagaagtggtgccacggacgatggagtcgtcgaccagcaggacgtttttatcgcggaactcggcgcggttggcattcagtttacggcgcacggacttacgacgcagctgctggcccggcatgataaaggtgcggccaacatagcggtttttaacgaagccctggcggtacggtttgcccagaatacgagcaatttccagcgcgatatcacagctggtttctgggatcgggatcaccacgtcgatatccagatcttcccattcgcgggcaattttctcgcccagtttcgtgcccatattcacacgcgcgctgtaaacggaaattttgtcgataaagctgtccgggcgggcaaagtatacatactcaaacaggcacggattgctgaccggattgtcagcacattgacgggtaaacaactgcccttcttcagtgatgtaaatcgcttcgcccggcgcgacgtcacgcaggaaatcaaagcccagcgtatcgagcgctacgctttcggaagcgaccatatattctgtacggttctcgtcaatatcacgttttcccagtaccagcggacgaatcccgtttggatcgcggaaagcaaccataccgtggccgataatcatcgccacacaggcatacgcgccgcggattaagcggtttgtggcagcaatggcagcgaaaatattgtcggcttccagcgggtagtggcggaagttgtccagctcgctggcgaagatattaagcagaatttcgctgtcggaagtggtgttgatgtggcggcgtttttcttcaaacagttttttacgcaactcgtgagcgttggtcagattgccgttgtgggcaagcgtaatgccatacggggagttaacgtaaaacggctgcgcttcagaggcgctggagctgccagccgtggggtaacgcacatgaccaatgcccatattgccctgcaaacgctgcatatggcgagcttcaaatacatcgctcaccagcccgttcgctttacgcaaacggaagcagttattggcatctatggtgatgatgccggcggcatcctgaccgcgatgctgaagcaccgttaaggcatcataaatgctctggttaaccggcataacaccggcgataccgacaataccgcacatacgtctttttcctcgttaagccacatctcagagcacttacgctctgggcaagaaactactgctgctttgcagataatcaaaaaaacatctgatgataaaactgaattgcgggatcagctgacttttgctccagtcttcgcttttgctcaccccggtaaaggagtcgagaaagaagagaatggcagcaacaatcaacacaccgcgcaacgcaccgaaacagacgcccagcacccgatcggtgccactcaaccccgttttctccaccaactggcctatcacgaagttcacgatagcaccaacgatcagggtagcgataaacagtaccgcgatggcaatcccatttcgaaccagttcgtcttcaaagcccgtaaaccagacactcaggtaagtgtagtaatgactggcaacaaagaaagcacaaccccatgtcaccaggcttaacgcttcacgaacaaagccgcggatcaggctaaccagagaggaaaaagcaatcaccgcgattatggcgtaatcaatccagaccatatgtgtcccacgattttacgccctgtcatcctgttcggggcgcattctaacagaaaaagaaaacgtttgcgtagggatttccttcccgcgcatcaataaaaatggcgctgaaaaaatattcaacgccatcgactttttatgcctttgcggcatcgggcaatgcgtgtcggatgcggcgtaaacgccttatccgacctacggttctacccctgcgtaggcctgataagacgcgccagcgtcgcatcaggcaagaccgtattaattcggcgtatagcccattaccacgccacttaagccagaaagttgcttcaactcacccaggctacctttcagcttatctttgctggcatccggcccaaccagaatacgggtaattttaccctgcactggcgtggatgggctcgtataaacccgataaccggcaccgcgcagcttaccgacaatctcattcactttatcggcatttttcagcgcacccagttgcacaacataggctttacccgtcggtgcagctttttcttccacgaccggcttcggttctggcttcggcgcaggtggtgcttcaacctttggtttaggcggctccaccggtttcggcttcggtggggcgaccggtgcaggttccggttcaaactcggtgttattggctgcaatagtggccggatcgaggctcggtgctgcggcatcacctgcccgcacctcttccgctgcgccttccggcggctgcgtcggtaacgcctgggtggcggctggcatcatatcaggctcatcacgatcgcccgctttcggcaccagcgggatagccgcgaactcatcctgataatgttttttctgcccgtccagcagccctggaagtacaatcacccccagcgccaccagcacgatcgtgcccactaaccgattctgaaacttacttgccaccgcttctcctcgcgtcaatcacttccatgacatgtgcgaccgtgtggaaagaaccacacaccagcacggtgtcttccgctttagcgtccgccattgcggcatcccatgcctgcgcaacgctatcaaaacttttgccgttacccaaatgctcaagcagttgttctgccgtggcaccgcgcggcccttccagtggcgcacaataccagtcatcaaccacgcttttcaaccaggccagagttccggcaatatctttatcatgtagcataccgataaccgccagcacgcgcccgtttttcggtagcgctttcatacgcccggtgagatattccgccgcatgtggattatgcgcgacatcaaaaataacgcgtgggctctcgctcacaatctggaaacgtcccggcaaaattgcgctggcaatcccgtcgcgaatggcattttcactgacttccagcccgctggcacgcagtgccgccagcgctgttgcggcattcggttgcgggacaagcggcaacggcagattttccagcgtgccgtgagcatcgctaaacgcccagtcatgatcggtgacggaatagttccactcaacgccccgacgttgtaacagtgcacctttttcctgcgccacatcagcaatggtagaaggcatttccggctcaccgacaattgccggtttttcgctgcggaagatgcctgctttctcgcgaccaatactttcgcgatctggacccagccagtcggtatgatccagcgcaatactggttactaccgcgacatcggcgtcgacaatattggttgcgtccagacgaccgcccagccctacttccagaatcaccacgtcaagttgtgcctgcttgaacagccacaacgcgctcagcgtaccgtactcgaaataggtcagggaaatatcaccgcgtgcgctttcaatctccgcaaaagaggcggtgtgggcgctttccggcaattcctggccctgcacacgtacgcgctcggtataacgcaccagatgagggctactgtagacgcccactttgtaccctgccgccatcagaatgctctccagcgtacggcaggtggtgcctttgccattcgtacccgcaacggtaaacacaaatggcgctggtttcaggacgccaagacgcgccgcgaccaggctcacgcgctcaaggccgagatcgatagttttactgtgcaggttttccagataagaaagccagctagccagagggctcgcggcttgaggagtgcgtttgataatcatggtatccgctgattcgttacggtgagaatagcaaaagggcagagccagtggccctgcccttatcagttatcaggcctcaggttcctgatccggtaccgggggtaccactacgccttcacgcggcgcttcaggattcggcgctggcagattcatcaacttcgccagaatgctcgccagtttcaggcgcatttccggacgacggacgatcatgtcgatcgcgcctttctcgatcaggaattcactgcgctggaatccaggcggcagtttttcgcgaacggtctgttcgataacacgcggaccggcaaagccgattaacgctttcggttcagcgatgttgagatcgcccagcatggcgaaacttgcagaaacaccgcccatcgtcgggtcggtcagcacggagatgtacggcaagccgcgctcctgcatttttgccagtgccgcagaggttttcgccatctgcatcaggctcatcagtgcttcctgcatacgtgcgccaccagaggcggagaagcagatcagcgggcagttatcttccagcgcctgctcaacggcacgcacgaaacgtgcacccacaacagaccccatactaccgcccataaaggcgaactcgaatgccgcagcgacaaccggcattccatacagagtgcctttcatcaccaccagcgcatctttttcgccggtttctttctgcgcagatgccagacggtctttatacttcttggagtcacgaaacttcagcacatctttcggctcaagctcgctacccagctccacaaggcttccttcatctaacaggctatgcaggcgattacgcgctgtcatacgcatgtgatggtcacacttcggacagacctcaagattacgttccagctcagcgcggtataaaacctgaccgcagctatcacacttagtccacaccccttcaggaatgctcgccttgcgggtgggagtaatgttgcttttaattcgttcaatccagctcattagggacctttctgtctgaacctggttcgatgccagttttatctttggggacgcataatgccatttttgcccccaacagaccatgaatgttgcacattaaaacataacagcccgaaactttggataaaaaagtggtcgaaccgcggagttactttttattttgcggcgcgtgccgcagcgcgtttgtgacggattatttcgatgacgcccggcaaaatagaaaccacaataatcccgacgatcagcagcttaaggttatcctgaaccatcgggattgtaccgaagaaatagcctgcgtaggtaaaaagcagtacccacaacagtgcgccgatcacgttataagcggcgaaatgacggtagctcatgtggcccattcccgcaacaaacggggcgaacgttctgacgatcggcacaaaacgggcgagaataatcgttttgccgccatgtttctcataaaactgatgggttttgtcgagataactgcgacggaaaattttgctattgggattactgaacaacttttcaccgaacaaccgcccgatagtgtaattgaccgcgtcacccacaatcgcggcgatcagcatcagcaccaccatcatatggacgttgagatcgttggtttccagacttgccaacgctccggcaacaaacagcaaactatcacccggtaaaaacggcgttaccaccagaccggtttcacagaacaaaattaagaacaaaatggcataaacccagacgccgtactccgcgaccagctctgccagatgcacgtcaatgtgcaggataaaatcgatgaggaaataaatcaggtccatatttgcctatgccttgtactcgtcatctttcaggctgtaactacgttggctacagcctgaaatgttccgagcattattctcgttagtccgccagaaatagcgggcccattggcggttttggaagatcataccggtcagggtaatccaccgcgaccagatacagcccttccgcttttgccgttgctgccgccagcgttctgtcctttgccgccagcaactctgctatccagctctccggctggttgtgggcaccgacttccatcaggctgccgacaatattcctgaccatatgatgtacaaaagcattcgctttaatatctaccaccacataaggaccgtgacgcgtgacattaatatgcataacgttgcgccacggggttcgggactggcactgcaccgcacggaagctggtgaaatcattctcgcccagcaagcattgcgcagcccgatgcatccgttcagcgtccagcggttcgtaaaaatgggttacccctttactcagtaccgccgggcgcagccgatgattgtagatgatgtagcgataacggcgagccgtggcgctaaatcgggcatgaaaatcatcaggtacagttttaacccaacgcacagcgatgtcaccaggtaaattcgcatttacgcccaaggtccacgccgcgtctttgcgcagcgcggttgtttcgaaatgcacaacctgcccggtaccgtgtacccctgcgtcagtacgcccggcgcagaagacggtgatgggttcgttcgccacctgggagagcgccttttccagcttctcctgcacactgcggacttcgttctgccgttgccagccgtaatacttactgccgtcgtactcaatgcccagcgcaattttataaactggcggttgttgctggtcggacattagtacagatactcctgcaccagtttctcggcgatttttactgccatcagcgcgccgccaaagcgaacgttatcggccacgctccagaactggacttgctccggcataccgtagtcattacgcacgcagccaacagaaagatgcggcgtaccgctagcatcacctacctgagttgggaattcgttctcttcagagagcacaatatcttcgccttgaacaaacgcatcacgcgcttcttctgctgccagtggacgcagagcttcaaagttgaccatctgggcatgaccgtagaataccggtgcctggacgacgctagcgctaatcatcagcccttcgtcctgcaggattttgcgtacttcgtcaacgatacgacgttcttcacgcacgctaccttcgctatccggcagtaacggcagcatgttgaacgccagctgacgcccgaagaaatcttcttcgtcaatcggaatgccgttgagcaatttcgcactctgccccgctaacgcatcgaccgcttttttgccctgggcggaggcactaatcaggctggtaacgctgatacgacttaaaccgccctgatcgattaacggtttcagtgccgccagcagctggctggtcagactgtctggtacggcgatgacattccggttccggtaatctgtcagtacaaacgggtttacttccggcaccaccagcggtacgtcgggttcgagagcaaacaatccactgctgtcgatcaccaggcaaccactgttggtcgcttcttcaacccaggcagcggtagcttctttgcctgcgacaaaaaatgccagctgcgcctgcgtccagtcgaattcagcggcatcctgcacggtgattgtcttaccaccaaagcgcagttgttcgcctgcgctttcgttacgtgccagtgcataaatttccccaaccgggaactgacgttcagccagcgtttcaagcagggcttcgcccacagcgccagttgcgcccaggacggcaatgttccagccttcagacatggtggtttactccagaaatagcaaagctccctgccaatgttacagcagagagcatgaagaagagattaacgtgccggatgatgaacggcgttaaaacccagtttacacagcaaacttgccgcactggcgtcatcacaaattacatacagagaactccattcacggcgctcaagatagtttttgcgcagtttatcgaactcacccggtatcccggcgactttacgcagcggtgcgtcatcgcggcgcacatcatacaccaaatgcaccagccttttcagcgtcggttgatcgagcgggccatgcagcgtaatgcgaccaaactctggcgcaggcagtaatgtatccagcgcaacgtgctgttcatgcccaataaacttgctataagcttcaaacacttgcgtagtaccgcgtgctttaccttccagggtatagcctgcgatatggctcgtgccgatatccacttttttcagcagctcgacgttgagttccggttcgccttcccagacatccagcactacgcttaacttctggccttcattcaggcaggtcagcaacgcagtattatcgacgactgcgccacggcaggcgttaatcagaatcgctccgggcttcaggctacggatcagtttttcatccgccagatgtagcgttttgtacggaccatctttaaagagtggcgtatggaaagtcagaatatccgcgcgctggactaactcatccaggctgcggaaatcaccctcatccccacggtcggcgcgaggcggatcgcaaagtaaggttttaatccctaacgcttccagtcgcgcctgcaatcgacgtccaacgttaccaacgcccacgatccccaccgtacggtcgtacagactaaatccatcgcgttcggcaagcatcagcagggaggagaaaacatattccaccaccgcaatcgcattacagccaggtgcagcggaaaaaccaattcccgcctgcttcaaccatgcttcatcgacatggtcggtccccgcagtggcagtgccaacaaatttaatgggttttcctgccagcaaagattcattcactttcgtgacgctacgcaccatcagcgcatccgcgtctgccagttgagcgacggggattggacgcccgggaaccgcggtcacctcacccaaacggctaaataagtcgcgggcataaggcatattttcatcaacaaggattttcacgtttgtgttacctgtatgagacgagagttaaccggacaagtgtgccataatctcgcggccaggcatacttgcgaagatttcaggtataaggatacgtaatgatacaacctatttccggccctcctcctgggcaaccaccaggtcagggagataatctgccgtctggcacgggcaatcagcctttatccagtcagcaacgtactagcctggaaagcttaatgacgaaagtgaccagtctgacgcaacagcaaagagcagaactgtgggcgggtatcaggcacgatattggtctgagcggagatagtccgctgcttagccgtcacttccctgccgctgagcataatctggcgcaacgtctgctggccgcgcaaaaaagccattctgcccgccagcttttagcgcaattaggggagtatttacgtctggggaataatcgtcaggcggtcacggattatatccgtcataactttggtcagacgccgctgaatcagctcagtccggagcaattaaaaaccattctcaccctgttgcaggaagggaagatggttattccgcaaccacagcagcgcgaggcgaccgaccgtcctttattaccggcggagcacaatgcgctaaaacagctggtgaccaaacttgcggcggcaacgggggaacccagcaaacagatctggcaaagcatgctggaactttccggggtgaaagatggcgagttaattccagcgaaactgtttaaccatctggtgacctggctacaggcgcgtcagacgctaagccagcaaaatacgccgacgctggaaagtctacagatgacgctaaaacaacctttagatgccagtgaactggcggcgttaagcgcatatatccagcaaaaatatggtctttctgcgcaaagtagcctttcttctgcccaggccgaggatattcttaatcagctttatcaacggcgggttaaagggattgatccgcgtgttatgcaaccgctgcttaatccttttccaccgatgatggacacgttgcaaaatatggcaacgcgtcccgcgctgtggatactgttagtcgcgattatcctgatgctggtctggctggttcgttaaccccgacgaaaactcagtatcgtgacaataatacccagcaccgcagagatcgccccggcaagaaatacgctagagtaaccaaacgtggtcgccagcattcccgccagcggcccggagacgccgagggcgatatcctgaaacgcggcgtaaccgcccagtgcggtgccgcgaacttgactggggacgcgtttaaccacctccacgcccagcgcaggaaagataaggctacatccggctccggttaacgccgcgcccgctaatgcgacccatgcacctggggcttgccagagcagcaacaagcccaccgtttctacaagcagagagacaatcgccactttcacgccgccaaaacggtccggcatccagccaaacatgacgcgcatcacgacaaatgcgccgccaaacgcggtaagagtaaagcccgccatcgcccatcctttgctggcaaagtagaggctaacgaaagtcccgataacagcaaaaccaacgccttgtagtgccagacctaaccctggtttccagataagcccgacaacgctccacaggcttggacgttctcccgccagggccggtactttgcgcactgtgccgttacaggcccacgccagtacgggtaataccattgtggtgatcgccagtgcggcaaaaccgtaatggctatgaatcaacaggccaagcggagcaccaacagcgagggcaccgtaaatcgccattccgttccaactcatcactttgccagagtgttttggccctacgatgcctagtccccaggtcagagcgcctgtcagtaactggctttcaccaaagccaagaatcaaacgcccgacgaccaacagagcaaatttgaacggtgcggagacaggcaaaatcgccgccagcagcaacgcgccgccagccagaccacaagctaacattccctgaagcgcgctacgttttgcaccatattgatcggccagtcgcccggcgtaaccacgcgtcagcaccgtagccagaaactgaatcccgacggcaatgccgaccatggtattgccatagcccagttcatgatgaacaaacagcgggataaccggcaacggcaaccctacggtcatgtaggtgagaaaaaccgcaaaagcgatgcggaagaggctaaaattggcagaagatcgtgtttcggtttggcttacagcagtcatgcattactccagaatgcagcgcaaggcgaggagtatccccgtctcatctctctggtttcagggttacggtgcgttggcaggatttaacgcgtacgtcttttcagaaggaaatcgacaaagcgggaagtttgcctggaactggcggcgattgtcaatgatgtgaaaaagggaaccatcaggttcccttttgcgttagtgccggaggccgcattggcgcgtaacgtcggatgcgacgctggcgcgtctactccgacctactgcgaattaatctttcagcttgcgcattaccagcgtggcgttggtgccgccgaagccgaagctgttagacataacggtggtcagttcgcgatcggtcgtttcggtcacgatgttcagacccgcagcctgctcgtccagctcttcaatgttgatgctcggggcgataaagccgtgttccagcatcagcagagagtagatagcttcctgtacgccagcagcgcccagagagtgaccggtcatggctttggttgcagaaatcgccgggctcttatcgccgaacacttcacggatagctgccagctctttcacgtcgccaaccggagtgctagtaccgtgggagttcaggtaatcgattggggtatcaacgccatgcatcgccatcttcatgcagcgtactgcgccttcgccagacggagcaaccatgtctgcaccatcagaggttgcgccgtagccaacgatttcagcatagatgtgagcaccacgcgccagcgcgtgttccagctcttcaaccactaccataccgccgccgccagcgataacgaaaccgtcacggtgagcgtcgtaagtacgggaggctttttccggggtgtcgttgtatttagtagacagcgcacccattgcgtcgaattcgcaagccatttcccagcacagctcttcgccgccgccagcaaacacgatgtcctgtttgcccagttggatctgctctactgcgttaccgatacagtgtgcggaagtcgcacacgcggagctgatggagtagttaacgccatgaattttaaacggggtggcgaggcaggcagaaacgccggatgccatcgctttggtgaccacatacgggccaaccgctttcaggccgcgcgggccgcgcattgcgtcagcgccgaacacctggaaacgcggggagccgccgccggaacctgcaatcaggccaacgcgcgggttattctggtaagcttccggagagaggcccgcatcagcgattgcctgctccatagaaaggaatgcataaatggatgcgtcgctcataaagcgcacaactttgcggtcaatgaggccagtggtatccagttttacgttgccccagacgtggctacgcatgccggaatccttcagctcctgagagaaagtgatcccactacgtccttcacgcagagatgccaggacttcctgctggttattaccgatgctggaaacaatgcccaggccagtaatcactgcacgtttcattcaatacctctgtaagtcgcacatagagtaagtttcgaatgcacaatagcgtacacttgtacgccgaacaagtccgatcagccatttaatagagaaatttgcgcagccttacacacatcgctaagatcgagccaccgcctgtaagacgagtaacttacgtgaaacactactccatacaacctgccaacctcgaatttaatgctgagggtacacctgtttcccgagattttgacgatgtctatttttccaacgataacgggctggaagagacgcgttatgtttttctgggaggcaaccaattagaggtacgctttcctgagcatccacatcctctgtttgtggtagcagagagcggcttcggcaccggattaaacttcctgacgctatggcaggcatttgatcagtttcgcgaagcgcatccgcaagcgcaattacaacgcttacatttcattagttttgagaaatttcccctcacccgtgcggatttagccttagcgcatcaacactggccggaactggctccgtgggcagaacaacttcaggcgcagtggccaatgcccttgcccggttgccatcgtttattgctcgatgaaggccgcgtgacgctggatttatggtttggcgatattaacgaactgaccagccaactggacgatagcctaaatcaaaaagtagatgcctggtttctggacggctttgcgccagcgaaaaacccggatatgtggacgcaaaatctgtttaacgccatggcaaggttggcgcgtccgggcggcacgctggcgacatttacgtctgccggttttgtccgccgcggtttgcaggacgccggattcacgatgcaaaaacgtaagggctttgggcgcaaacgggaaatgctttgcggggtgatggaacagacattaccgctcccctgctccgcgccgtggtttaaccgcacgggcagcagcaaacgggaagcggcgattatcggcggtggtattgccagcgcgttgttgagcctggcgctattacggcgcggctggcaggtaacgctttattgcgcggatgaggcccccgcactgggtgcttccggcaatcgccagggggcgctgtatccgttattaagcaaacacgatgaggcgctaaaccgctttttctctaatgcgtttacttttgctcgtcggttttacgaccaattacccgttaaatttgatcatgactggtgcggcgtcacgcagttaggctgggatgagaaaagccagcataaaatcgcacagatgttgagtatggatttacccgcagaactggctgtagccgttgaggcaaatgcggttgaacaaattacgggcgttgcgacaaattgcagcggcattacttatccgcaaggtggttggctgtgcccagcagaactgacccgtaatgtgctggaactggcgcaacagcagggtttgcagatttattatcaatatcagttacagaatttatcccgtaaggatgactgttggttgttgaattttgcaggagatcagcaagcaacacacagcgtagtggtactggcgaacgggcatcaaatcagccgattcagccaaacgagcactctcccggtgtatagcgttgccgggcaggtcagccatattccgacaacgccggaattggcagagctgaagcaggtgctgtgctatgacggttatctcacgccacaaaatccggcgaatcaacatcattgtattggtgccagttatcatcgcggcagcgaagatacggcgtacagtgaggacgatcagcagcagaatcgccagcggttgattgattgtttcccgcaggcacagtgggcaaaagaggttgatgtcagtgataaagaggcgcgctgcggtgtgcgttgtgccacccgcgatcatctgccaatggtaggcaatgttcccgattatgaggcaacactcgtggaatatgcgagcttggcggagcagaaagatgaggcggtaagcgcgccggtttttgacgatctctttatgtttgcggctttaggttctcgcggtttgtgttctgccccgctgtgtgccgagattctggcggcgcagatgagcgacgaaccgattccgatggatgccagtacgctggcggcgttaaacccgaatcggttatgggtgcggaaattgttgaagggtaaagcggttaaggcggggtaatctgctctcgcagtgtttgccggatgcggcgtgaacgccttatccgacctacgtgtgacgtgtaggcctgataagacgcgataagcgtcgcatcaggcatgctgctccagacgccgcaacttactgctgactcgcctgctgaaacaggttttcccacatatcggtcaccagcgcctggtcacgcgggctcaattcaccagcaccaatggctttttccagactctggctaacggtcgtatgcaccgcctgagcggagtggtcatcaccactttccagttctgcgatggctaatgtcaggtggccacgcaaatacccactggcaaacaactcatcatcactggcatggtcaaccataccgtcgattaatgccagaatgcgactttcaaactccgcgatcatcttctttcctcattgtaaaacgtggcgctggcttcagttgagcgcttccggccacgggaactgttccgccgtaagttccggcgtgtgataataattttgtagtgctttaatgaagcgtgccggacgttccggaatgccatttgtcagataatccatcacctgcgcatgtactcgccgttgaaacaccacacgatccggttcgaaatccccttccagattgtcgcaactgacgttaaacggatatcccgccgccacacagaacaaccagtcgagcgcctgcggcttcacttcaacatcttcaaactggctttgcgtttgggcatcgcgtccgtccgggcaataccagtagccgaaatcaaccagctcacggcgcgctttcccggcaatacaccagtggctaatctcatgaattgcgctggcataaaagccatgagcaaagacgattcggttatacggtacttccgcatcagcaggaagatagatcggttcgtcgtcgcctttaatcagacgggtattaaaatcatcggcaaagcagctattaaaaatttcaatcaactgctcgtagtggtgtgtactgttcattagttcatccccaaccagtggaggatctcctgtccgtggctgtcgtaaagtaatttggcactcatcaccgcgctgacgataacaatcatcgggcggatcagcttttgtcctttgctcaacaccagtcgactacccatgcgcgcgccgaggaactgccccaccagcatgacaaagcccgtcgcccaaatcactttgccgccgagaataaacagcagtaaaccgccgatgttactcgttgcgttgagtaatttggcgtgagccgtggctttggcgaggttaaatccgcacagcgtaacgaaggccagcgcgtaaaagctcccggcagccgggccaaagaatccatcataaaaaccgacgcagccaccggctattaacgcgaagggtaaaccgtacatccggcgctggcggtcttcttcacctagctttggcatcagcaagaaatagaggccgatacaaattaccagaatgggcaaaatctgccgtaagacatcagcctgaacgtattgcaccagcagtgcgccgctcatactgccgacaaaggtcatggcgatattgagtttctgatcgcttaaactaaccactttgcggcgaataaagtagatagtagcggaaatagagccgccgcaggcttgcagtttattggttgccagcgcattagcgggagacatccccgctgccatcaatgccggaatggtgagtaacccaccgccaccggcaatgctgtcgataaatcccgccagcatggcgacaaaaaagagaactcccagcaacagcggggaaaccataaacaggctattaaacgtttccattagatcacgtgctcatccagtagcgcctggcaggaaggcggcaacggaggcggtgtcttcttctcaggctttgttgttcccggttttggaggttcaaaccagctttgcagttctgccccgcaaccatcgccacttggcggtaaaggttgatcttcacactccagactatcggcagggcaacgtaatcgtacatgcatatgcgcgcgatgctggaaccagggtcgcactttgcgcaaccagtcgcgatcggtgcccgcatcaaggcaaagttgttgtttaatcgccggattaacaaaaatgcgcgtgacgtctttgtcctgggcggcgagtttgatcaagctgaaaatttctggcttccacagcgtggagacaacgtgtttaccgtcgcgggaaactaagtccagtgcttgcgggcgcaagagctgcgcggaggtccagcgagttttcggcagttgcagaaagatatcgacatccagtccggtctggtggctggcatgaccgccgttgaaacgcccaccagcgggcatccccatatcgccaatcagcaccgtacccatgcccagattgctcacctggctactcagacgctggataaacatcaccagatccgggtgaccgaaatagcgacgctgatcggtacgcatgacctgataatgttcggactgtatcggcagcgtgtcagcgccgacaatacagccattagaaaaactgcctatgctttgtgcgctacccggcacaggttgggttattttttgccacggcgtcgctgccaggctggcgctactggcaagcagagccagcagcgcaatcgcggttttattcattttttaccagcgtggaatatcagtcttcacatcggcattttgcgcccgttgccgtaacaggtgatccattaaaacgatcgccagcatcgcttctgcgatcggcactgcgcggatcccgacacagggatcgtgacggcctttggtgatcatctcaacttcttcgccaaagcggttaatggtacgacccggcacggtaatgctggaggtcggtttcagcgccatatgggcaatgatttgctgcccgctgctgataccgccgagaatgccgcccgcatggttgctctggaaaccgtctttggtgatttcatcgcggttctggctgccgcgcagcgccaccacgtcaaagccgtcgccaatttccacgcctttcaccgcgttgatgctcatcagcgcatgggcgatgtcagcatccaggcggtcaaagaccggctcgccaagtccggcaggaacgccactggcaacaacggtgactttagcgccgatggagtcgccctcttttttcagcgcacgcatcaactcgtctaacgcgtcgattttgtcggggtccgggcaaaaaaacggattttgctcgacctggctccagtctttgatatccagcggaatgtcgcccatctgggtcaggcagccacggatttcaataccaaatttctcggcgagatattttttggcaatagctcctgccgccacgcgcatggcggtttcgcgggcggaagaacgtccaccgccgcgataatcgcgcagaccgtatttttgttcgtaggtgtaatcggcatggcctggacggaaaacgtccttaatcgcactgtaatcctgagagcgctggtcagtgttttcgatcaacaagccaatgctggtgccggtagtaacgccttcaaaaacaccggagagaattttgacctgatccggctcgcggcgctgggtggtatagcggcttgtcccagggcgacgacggtcgaggtcatgttgcaggtccgcttccgtcagcggaatgcctggcggaacaccatcgacgatgcagccgagcgccagcccgtggctttcgccgaaggtggttacgcgaaagagttgtccaattgtgtttccagccatcacggctccgttattgttgtgtttgcgtgtttacttaatctttataaatcgcgaaatgttctcgtgcggcaataagctgctctttggtgagcataaacacaccatcgccgccgttatcaaactccagccaggtgaacggaacatccggatattgttccataagatgtaccatgctgttgccgacttcacaaatcaacacgccatcatcagcaaggtaatctgccgcgttaccgagaatgcgacgcgtcagtttcaggccgtcagtgccagatgccaggcccagttccggctcgtggcggtattcgtttggcaggtcggacatatcttccgcatcgacatacggcgggttagtgacaatcaggtcgtactgcactttcggcaagtcgcggaacagatcggaacgaatcggaatgacgttgtggatcagaccgtgttcttcgatgttctgttcagcaaccgccagcgcgtctggagagatatccaccgcgtcgacttctgcatccgggaaggcataagcacaggcaatggcgatgcagccgctaccagtacacatatctaaaatatgctgcggttgcttgctgataagtccggcaaatttattgttgatcagttcaccaatcgggctgcgcggcaccagcacgcgttcatcgacgtaaaattcatggccgcagaaccacgctttgttggtcaggtaagccaccggaatgcgttcattgacgcggcggatcacgcgttcaacaatacggtgtttttcgctggaggtcagacgcgcggtgcgcatatcttccggaatatccagcggcaggtagaggctaggcaacaccagctgtacggcttcatcccacgggttatcggtaccgtgaccgtaccagatatttgccgcgctgaagcggctcacgctccagcgcaacatgtcctgaatggtttgcagctcatttactgcttcatcaacgaaaattttatccacgtattcctccagggcatgatcgcaataatttcggcggctagtttgccatgaagatgacgataaatcagcattcacgcgcggtgagtgaggaaaaatacgtttaaaacgatcgattgcgctacgagtcgggtaaactgtaggaaaattagaaatagagacagataaatgaaaaagaaaacaacacttagcgaggaggaccaggctctgtttcgccagttgatggcggggactcgcaagattaagcaggacacgattgtccaccgaccgcagcgtaaaaaaatcagcgaagtgccggtgaaacgcttgatccaggagcaggctgatgccagccattatttctccgatgagtttcagccgttattaaataccgaaggtccggtgaaatatgttcgcccggatgtcagccattttgaggcgaagaaactgcgccgtggcgattatagcccggagttgtttttggatttacacggtctgacgcagctgcaggccaagcaggaactgggggcgttgattgccgcctgccgccgtgaacatgtgttttgcgcctgcgtgatgcatgggcacgggaagcatattttgaagcaacaaacaccgctgtggctggcacaacatccgcatgtgatggcctttcatcaggcaccaaaagagtatggcggtgatgcggcgttgttggtgttgattgaagtcgaagagtggctgccgccggagttgccctgaggagttgagcgcgttgcgccaggtacgggtaatggcaggggcgaatgcccctgcctggtgtatctaagggttacaactcattcagtatgtactggaaccggcaagtagaatcgattggctgcatactgctggtatcaacacgcacgaccatatcgtgtaactgtttgtccgttatagggtgtcgatttggcgtgacgctgacttccgccttgtcacatccgctcgcggtaaaagttatcatctgtgcaacccagcggcagtaaccacctgtttcattcatctgcgtactgtcgcacaacttcccatctttcatcaaatacgtactaagcgttttctcaaccacaccgcccgtgctctgcagggtgagcagtttactcttactgacataattctcattccaactaacgtcataaggttgaacagaaacggatggacaaatcgtgtcgtgactatcaggcccctgatacgtcacgccccctggagaggcttcagagtcattcataataaccaaccatggacaagaaaagtaagattcaatctctgcagagacaataacctcaaatgtataatacccgcagttccacccagacggtaatccaggacaacttgctttgttgatattttgatggtagccaatcagcttaacgctaggggcaggaggaggaccactccagctcacattttgcaatatttccccagtcatgagccattgactacttttatattcaccaacgtacactgcggatggcatcattatttttaaattaaaagtcgcaatattacggctatcaccgttgtaaccgtagtaaacgtcaacgctatgcccggcagccatagcttctgtagtagcaataagcatgaccagagcgaacaaccatcgtagtattttcattttaaatatactcaaatgtcgcagttaaagaggcggtaaattcaccgatcgtcacatcacggccgcttttcgcctgtagccaggctctgaaattgatatcgttattgccattggttagcgcaaaggtcgccccatttgtattgttgatggcaacctgcattccgtcggttttttccatgccaattcccactccctgagcggtactactcgtatccagtgccagaaaaccgggttgttcgctgtcttctacccccgtgagcgtgacttttacgttgtatcccgccggccctttgcaatctttcagcttaaagactacgggtacacgagcggactggcctgcaacgttcaaatcctgacgactgaccgtgggaaagcgcacctctgccagatattggccatccaccaccagcgcacaggatttacttaataaattaccggagaaatgcagattattatctgccgcgaataacgtgctactcattgccaatatcagccccgctaacaggacgtaaccaccggactgaatcatacttttattcattgataatccacccgtaatgttgcgtaagcgctaaaattcgtatcgcttaacacagcatcactcgcttttaccggtacggcctccagcttcggcttttgcgtaaaatcagtggcgttgatagcaagcggagtattgagtttaaaacgctgaccatcgtgctgaagctcgataccaaaaccgggtacatcagtttcaattgctgcatcattaaaactggtttgtgtaccagtccaggtgagggtcatctcccaatctggatgacgggtcgtgctgtcacaagtgagttcatatggcacctctttacgaccatagttgccgttgatgtcgtcgataatgagatcgcgaaattcgacttcaatggttttaccaccgctgatgctacaggttggcggactcaataatgtcccgtgaaaggtgatgtcttcatcagcagcatgagctatggcgctactgacacaaagcagggttaagaaagtctttctcattgatagtccaccaccatggtcaaactggcgttaaactcgcccgcagcaagttgcgccccgcttgccttcacaggtacagccttcaactgtggctggttattgatattaaatggcgtccagctattttcaccgacggcaaacaaactgttatcggcgctattttctatccgaatgcccagcccggtgatattggtactgagtaccgtttcgccgttaatcgtactggtattgcccttaagttgcatccgcaagtcgttagcaagactgtttgtgcagttcaacgtgtatttcgcatcttgccgataattggtgccatcaacgttatcagcaatcatattgccgaactctacctggctgcccttgatactacagggtggcggagcatcgaccaacacgcgcagaattaaatccacgggtttactaccagccatagcagataaactacagacactgcataccagcagccctgcgcccactacaaacttttgactcataactccccccgtcatcagcctttgcggctctgctcttcatccacctggcagctgttgccattgcactggaagaacagcggcatccgtgcgccaaagtcgttgacgtaagtcagcaccggtacgctatccattttcacattcagcggtaccgtggttttcggctcaatgaccagagggctgaaccctgcagctggattaccgtttttctgcgcactggcgttgctgataatcacgtagtacggcgttgggttattgacggtaaatgcctgaccgctgcgggtgagcgtcaccttgtgctgccacggacttttcatactgaccttttccagcgcctttggtcgccagaacaacttgatacgcgtttgcagcgcgatttgcagggtattgggtttgttactttttggcgggatctcgcgcacgttaaagtagaacatgctttcacgatcggctggcaatttgttgatatccggcattccctgcacttttacctgcccgttcatcatactatcgatgcgttgcactggcggcagcacagttaacgggctggtgatcttgttacccttttcatcttcaatccagctttgagccagataagggagtttcggatcgttattacgcagcgtcacgctgatacttttgtcgctttcattaaatatcaaacgggtacgatctggcgttacagacgccagggcagacaaactggtagcgctaagcagtaacgccagcgtcatagcacccaatttggcagagcaaagtaaatcagacatggatcattccttaatcacgttattggttagcactaacagaaacagggggatcggtgggtgtcacctgttgcgtctgctcctgaatgacaggctttatgtcatcaggaacaaccggcgcgacgttgcctttatgctggcatggcagtaacaagccgttaaacagatcggcaggcagcgggtccggcaggttgatatcgcaatgcgcaacaccactccagaacacactcatatgttcgccaggtttcaccccagccagatagacactaccgtcatcatcgacaaggcccactgtctgctcgttatcattttttacttctgcgccaaacggtggatggctgccatcttgtaaacgcagcaccgccatcgctttttgaccactgatgacggcaaatttgcggtagccaatggctccttcagttagcgtggcttgcaccacgctctgggttgcttcggcgttttccggcaatttgttgaggtcgatatacgcctgattgcgataataattgttaacgtcagaaacgacggctttaccaaacatattggtataaacagcagccccgttaccttccaccggaacatcggcaacgccatcggcatcaatcagcaggcgtgtcccgcccatattctgggtacggtgaagtgcgccgccgtgggtagtaagcgttgcgccgccctgtaagctcaagcccgcagaggtgtattgcccttcatggtagttcgcactgaggtcaacctgcgccaggctaccatcatggctgtagtagccatcaacgctggtgtgtttgtcactggtgccgatgttcaactgatagtgagtcgcgtcatcgacacggctaaaataaccgacctggctgctgtccgtcccactgccatagttgccgttatagctaacggtactgttgtcgccccacggcatactgagcgaaatttacatgcccttatccgcccggttgtcatactcgtagcggtagccagtcagggaaacgctcatattacgaatgctgcccatattgaaatagtgggagagcatgatgttgtagtttgtctgctcctcacgatcccagtaggtatggcgggtatagttgagataaacgctaacacccgcatcgcggaagttctggttataagtggcggtgtacatctctttgtcgttgcccgtacggaccatttcgctgtcactggcatccagatactcgctcatggtcataaagttctcttcgctgaagcgatatccagcgaaagtgacgcggctgttgagctggtcaaagtctttggaataactcacacggaaggagttaccgtccaggctacctttgccataagcggtgtctttatccagtttggtatggctatgagtaacatcaaacgcgaccgcgccgaaggtagacaaatcgcgaccgacgcccagcgccgcagactgatagttttcatcacccagcgcaccgccatataagctccagccgttagcgatgccccaggaggcttcagcaccagagaaaaatcccccctcgacatggtggccccactcttgcggacgtcccatcatgatcttatagcgaacctggcctgggcgagtgaggtatggcatgctggcggtgctgatgtcatattcctgcacctggccgttctgttcttcaatgcgaatatgcaacgtaccggagacggaatcaccaagatcctgaatacgaaacggtccagccggaacctgcgtttcgtaaatcacacgccccatctggctgacggtcacttttgctgtggtgtgtgccacgccggaaatgtctggcgcgtagccgcgcagattgggaggcaacatttgatcgtcagtgctgacactgccaccaacataattaaaaccgtcgaaaatatcggaattgaggtaatcttcgcccagcgccagtttggcttttaaactcggtaacgcccgccaggcataatagcgactccactcccattttttttgtgtgtcatcgccgccaaattcatcgtcatcatcattactgcgcgtatgttgatagttggtctgccagtcagcgcgcatacgccatggccccaggttaaccccgaccgtcccgttgccgctgatctcgttactgtcatcgccgccattttcttcgtgtcgtgtttgcgcagtgatgctgtagtccgcaatgatcccggagatgccatcatcccaacgagaaggtggatcccagtcgggccaggcatattcgaggtaagcctgcggtagactaatgactaatgcggactggcttaaatcagccttaatttccacgccttccagttgaccgggcttcaggcatttaccatcgtggctccattgcagatttttcgccacgtcttcttttaaaccaaactgcgccaccagttccggtgtcagacaagcatagcttttgctaacgtcatcttcaccagcataccagtaaatatcgtactcttccgccaatggctgtttatttagttgaacctgtaaattgtattttccgggctcaacatacccctggctggaaaaacgcttcagatcaatttttgtgtcgccttttaattccagaaaacgggaatcaaactgaatgtcgtcttcagcccagacactgctataactcccactcattgccagcgcaatgcaccacggaagaatccgtaatcgaaaaagagaatggtcaggcatacacgtttttatccgtttttattcttgttcggtcaaaatccatttaaataccccatagcagtgtcgctatgggggtatgccttacaggtaagtaatctggaaggtggtatttgcttcgaaattacccagatctggcgcatcagctgcgccgaccagccaggctttaaagttcagagtctgcttcgctttgcctttattagtggcagtatctttcacgattttctggtcaatacccatgccgcttttgtaagaggtacccagagagtcaccgatcgccaggctaacattgttaaatgccgcaccggtatcggtattgaaaatggtgtaataattgccgctatttgcagaagaaacggtaccagtaaaggtagtggtcattgtttcctgagtatcaaatacgcaatcttgcaggcgaatctggaaatttttcggcgtggtggtgccgttatttttcagtttttcggcaccgatatcacccatatcaacttccagtttgtgatcgtccggaacgatagaacacacactgtcttcaatggtgccgtaaaaacgtgcagtaccgttgttacccgcagcgattgttgccgtagaggtgaacgcgcccatcaccattgccgcagcaatagctgttttaacaaacttactcattatttgtccttaaactataaataattaaaatataaacattgcaatacattgattcagtcaatagccaatgtttatacccagccattgaatacggcatgcgatccaaaaaaacaggtcgtaaaaaatgtattcgttggtgtggggtcgaatagtgatgttttcactcccctgattcaatttaattttactaatgagtaaatgtagatttaattaatatattgataggggaaagattatcttaaggatcttctaaaaaaacacgaaatatatatttagaaaaaacaggaagcatatcaacaatgaatgccaatagcttaaaaaacaaacaatgaacatataatgcgattggcattaacccgcttttgtcgatataatatataaacactatagccagaatttaatcaagtttcaattacgtcctgcctgattattcaactctattttctccattatctgtattaataaatgataatgagtgtcaaacagacattattcatttcaacatgtaactttgggcaaaatcaagatacgcgcagaagaatactttccgaatgaaagttaaaggtgttttatttatagatggggagagtcttcgatagtagtgaggttgacagatatccgctgcctgatgagcaattatgcccaatgaatctacctcattgggcataatttggaactcatcagatagcttttgccatcttcagattacacgggctcatctgccagttgaatgtgccgtttccgctttcatcaagcgttacgctggcaatggcgctggtggtaaacataggcggcgtttcgcccggacataactcggcaaccagatacccgactaacggtaagtgagagatcaccagtacgctagcaacaccttcattggtcaacgcctgcaaataggcactgaccagaccaacatcgccgcagggcgttaactccggcagaacttctgcactggaaggcaggttcagacaatcccctacttcttccagtgtttgctcggctcgcaggaacgggctcaccagaacgcgttcgatttccactttttgacctttcagccagttcgccatcaggcgagattcgtcacaaccattagtggtcagaggacgaacggaatcactggcggcatcgagggctgcgtcgccgtgacgcatgataaaaacttgcatattgcaccgcttttgttaaccagattcgcccgttttctttcatctgaaaccagagaaagaaaacggtggccggcattgtgccttatccattcaccgaatgaaacgctgttttttacctcaatggcgtaagtatagtcaatatgcgtttacattttgaccaacactccgccattcagcgcggattcatatagctttgaccttcttattgcaggtcagttgcagttgttttccaaaaactttccccacgcgcgcccatctcgaccaaacgctcgcaaggggtaaaacgggaaccatactgcgtggcaagtcgttgcattattgcaaccacttcgcccgcgccgagagaatcgatatagcggaacggtccaccgagaaatggcggaaaaccaatgccaaataccgcgccaatatccccgtcacgcacgctacggataacctgctcatcaacacaacgtactgcttcattcagcatcaacatcacacaccgttcagcaacctgcggtgcggagattcgcccctgcccttgtgtgccaatcagcgggtaaatggcgggatcgacctgttttttgcttttacgccctttctgaccataaagatagaaaccccggccattttttctgcctttgcgatcgtcgttcaaaatactagaaacaacatttgcaggcgcgctaaaacgttctccataagcggcttccagtacaggaataattttagtcccggtgtcgattcctacctcatccaaaagttggattgggcctaccggaaaaccaaatttcactagcgcggcatcaatgtgctctacccgttcaccttgggtcaacatgcggatagcttcattaatgtaaggcgctaagatgcgattgacgtaaaaaccggctttgtcacgcacgacaattggcgttttaccctgttttttcgccagttttactgtggtagcgatggtttgcgcgcttgtccccgcatgaggaataatctccaccagcggcattttttccaccggactgaagaaatgcaggccgataacttgctcaggtcgcgtggcgtgagcggcgatatcaccaatcggtaaagaactcgtattgctagcaaagatggtatgagcggcgcaattttgctcaacttccgccaccatctgttgtttcaattcgagattttcaaacaccgcttcaataatcagatcgcgatgggcaaagccgcgatagtccgtcgttccggagattaatgccagctgtttgtcacgttcgctggctttgagatgacgacggcgaactttgccctccagctgatcccaactgtacttcagcgcatgatttatgccctgcgggttgatatctttaattctgaccggaatccccgctttacaagcagtgacataagcaataccgccgcccatcaagccaccacctaaaatccccacgctgtttaatggcgcaggcggcgcatcactgccgggatctttcttcacgtccgtactggcaaaaaagatactacgcagcgcctggctttgtggcgtcatcgccagttcgccaaacgcccgagcttcggcgtcataaccgctgctggtgccctgcgctaatcccgtttcaacaacctccaggatgcgttctgtcgccggataattgccttgagttttgtgttctgttttcttgccgaccattttgaacagcagcgcacgacctaacggccccgccagaatacgctcgcgtacaggtagagggcgggaagatgggcgctccttctttgccagctcaacagcggcttccagcagaatggagtgcggaacaacgtcatccaccagccccagctttaatgcctgtttcgcccgaagttgttttccggtgaggatcatctctaatgctgtgctgacgcctatcagacgcggtaaacgctgggtgccgccactaccgggtaacaatccaagttgtacttcaggcaaaccgagcaccgttttaggatcgtcagtacaaacgcgaccgtggcacgccagcgccaactccagcccaccacccaggcaagcgccatgaatagccgcgataacctgaatgggcaaagcatgaatctccgccatcaactgttggccctgccgcgccagagcttccgcttcttgcgccgttttgcagttgccgatcatgttgatgtctgcgccagcaatgaagttgtccggtttagcggagacaaacaccacgcctcgcaactctttgttttcacggagttgcttaataatggcgcgcacctggctggcaaactccgccttcagggtattcattttctcacccggtacgtcgatggtgataacggcaatgttgtccagacgaacattaagggtaaacgcacttgtcatttccattattccgcctccagaaccattgccgcgccaagcccaccggcagcacaggcggtaactaaaccaaatccaccgccgcgacggcgaagttcatgcaatgtctgggtaatcatccgcgcgccggtcgccgcgaagggatgcccgtaagcaatgctaccgccaagcacgttaaatttgctatcgtccacttcgccagtggcatgtgcacgccccagtgcttcacgagcaaaacgttcactacccagcaactgaatattcgccagcgtctgagctgcaaaggcttcgtgcatatcgatcaatgtcagatcgctcatcgtcaaaccggcacgctccagcgccagcggtgtactccaggctggaccgagcaacatgtcctgccagacatcaatcgcagtaaatgcgtagctgcgcagataccccagcggcaccagccctaattctttcgcccgggattcagtcatcaggatcaccgctgccgcgccatcggtcagcggcgtactgtttgccgccgttaccgttccgtgtttgcgatcaaacgccgggcgcagctttgcgtaatcggcaaggctggaattaccgcgaatattgttgtcttcgacaagcggttgtttataaggagggataaaggcagtcatcacctcttctttgagttttccgtcactccatgcctgagcggcacgctgatggctacggtgcgctaatgcatcttgctgttctcgggtgatgccgtaggttttcgccatttgctctgcggtgtcgcccatccgcaagccggtagaatattctgctaccgcaggtggtacgggcattaagtcgcgcaaacgcaggcgagagaagagtttcagtcgctggctcatggtacgagctttgttgacatcaaccagcacgcgcgccagttttttactgacgccaattggcaatacgctagaggaatctgccccaccggcaatccccgctcgaatagttcccgccatcaggctttctgcgacgtttgcaactgcctggaaactggtagcgcaagcgcggctgacgctgtaagcatcggtatgtacattcattcccgtaccgagaacaatttcacgcgcaatgttgggggcttcaggcatttgtacgacctgaccaaagaccagttgttcaatcacttcggcggggatctcgctgcgtgccagcagttcgcctaccaccatcttccctaaatcaaccgcgggaatgccatgaaaagccgtcgcctgacgggcaaaaggcgtacgtaaaccgctaacaatggcgatacgatcgccctggcgggtaaccagcggtaaaacctgacccataacactcccctgtaaaaaaataaataaagtggtctgacctgatcatagtcttaaccatttttttacatttagccaagtggagaaaagggaaagtgggagctatgacacagagagaaaagaagaagagaaaagaaaacgcccctgccagcaactgacaggggcgtacgtacccgagaggaattaacgcagacccagctggaaaatcagcatttcagcttcgcaggcaaaagtgaaatcgatatccaggcgcacaccgtcagactcttcagtgaaagtcggggtgattttgcaaggttcagattccacgctacgggctttttcagtcagcgccgccagcgtttgctctgcttctgcgcggtttgcaaacacgcggctgtaagacgcggtgcagtcggagttgtccataatggtgccaacatccatacagcagcaaaccggggtttcatcagcactacatttactcatcgttgatttcctctgtatgtgcacccaaggtgccagataaacgttgtggatattttacgcttccggaaagtgctgctccagttgttaattctgcaaaatcggataagtgaccgaaatcacacttaaaaatgatctaaaacaaaattcacccgaatccatgagtgcgccacctccaaattttgccagctggatcgcgtttcttagatcatatttgaaaaaagatagaaacatacttgcaacattccagctggtccgacctatactctcgccactggtctgatttctaagatgtacctcagaccctacacttcgcgctcctgttacagcacgtaacatagtttgtataaaaataaatcattgaggttatggtcatgagccagaaaaccctgtttacaaagtctgctctcgcagtcgcagtggcacttatctccacccaggcctggagcgcaggctttcagttaaacgaattttcttcctctggcctgggccgggcttatagtggggaaggcgcaattgccgatgatgcaggtaacgtcagccgtaaccccgcattgattactatgtttgaccgcccgacattttctgcgggtgcggtttatattgacccggatgtaaatatcagcggaacgtctccatctggtcgtagcctgaaagccgataacatcgcgcctacggcatgggttccgaacatgcactttgttgcaccgattaacgaccaatttggttggggcgcttctattacctctaactatggtctggctacagagtttaacgatacttatgcaggcggctctgtcgggggtacaaccgaccttgaaaccatgaacctgaacttaagcggtgcgtatcgcttaaataatgcatggagctttggtcttggtttcaacgccgtctacgctcgcgcgaaaattgaacgtttcgcaggcgatctggggcagttggttgctggccaaattatgcaatctcctgctggccaaactcagcaagggcaagcattggcagctaccgccaacggtattgacagtaataccaaaatcgctcatctgaacggtaaccagtggggctttggctggaacgccggaatcctgtatgaactggataaaaataaccgctatgcactgacctaccgttctgaagtgaaaattgacttcaaaggtaactacagcagcgatcttaatcgtgcgtttaataactacggtttgccaattcctaccgcgacaggtggcgcaacgcaaagcggttatctgacgctgaacctgcctgaaatgtgggaagtgagtggttataaccgtgttgatccacagtgggcgattcactatagcctggcttacaccagctggagtcagttccagcagctgaaagcgaccagtaccagtggcgacacgctgttccagaaacatgaaggctttaaagatgcttaccgcatcgcgttgggtaccacttattactacgatgataactggaccttccgtaccggtatcgcctttgatgacagcccagttcctgcacagaatcgttctatctccattccggaccaggaccgtttctggctgagtgcaggtacgacttacgcatttaataaagatgctagtgtcgacgttggtgtttcttatatgcacggtcagagcgtgaaaattaacgaaggcccataccagttcgagtctgaaggtaaagcctggctgttcggtactaactttaactacgcgttctgataacgcgttcgcctggataaagtcacctgcatagcaggtgactttaactcccccacttcaccgaaagtagtgtcctcattgcttacctcctgagttttgcaaacagcctgttggcagcttgccctttcaaatcaataagcggtatccacagacaaacctgaagggaaaggcatattttcaggcgttctgctcgtccttctcaaagagtttacttttctgcatttccaggatactcccccccccctggctattgtgcgctcatacactcaaattaaagataggttctaaataaatgagcgttttttgatagtctatttcattaggtaatatatatttgtaacaaatcaatcaaaatggaataaaatcatgctaccatctattagtatcaacaataccagcgcagcttacccagaatccatcaatgaaaataacaatgatgaagttaatggattagtacaagagttcaaaaacctttttaatggtaaggaaggaataagcacctgtattaaacatctacttgagcttataaaaaacgccatacgagtaaacgacgatccttatagatttaatattaataattccagtgttacttatattgatattgactccaatgatacagaccatattactattggtatcgacaaccaagaaccaatagaattacctgcgaactataaagacaaagaactcgtccgtactatcattaatgacaacatagttgagaagactcatgatatcaataacaaggaaatgatcttcagcgcattaaaagaaatatatgatggagatcctggttttatcttcgataagataagtcacaaactcagacatacggtaacggaatttgatgagagcgggaaaagcgaaccaacggacttatttacctggtacggtaaagataaaaaaggcgactctctcgctattgtaattaaaaataaaaacggaaatgattacttatctctcggttactacgatcaggacgactaccacattcaaagaggaattcgtattaatggtgatagtctcacccaatattgtagtgaaaacgccaggagtgctagtgcgtggtttgaaagcagtaaagctatcatggcagaaagttttgcaactggttccgatcatcaggttgtaaacgagctcaacggggaaagactgagagaaccaaacgacgtttttaaacgttatggtcgagcaataagatatgattttcaagtggacgatgcaaaatataaatgcgaccatctaaaagaaatagtttctactttagtcggtaacaaaattaacgttggccattctcaaaaaatatataagcattttaaggatctcgaaggtaaaattgaagaaaggcttcaaaatcgccaggctgaatatcaaaatgaaattaatcaaccatctgcgccaggtgttaattttgatgatatttaaaattatttttccagttttttgatttttcaacagctgaatatcggaaatagtcagtgacgaacatcagtatttttacataattacgtctaggtcattgtcggtttatctccttttacttgtggtaattgagggataacaacaaaaaaggtgagttttgcgactcaccttttttatttgtttcttattcagaatcaatatcttttaaatcatcctgaatcgcttgtgcgttcggattttcctgcggtttgagttcgccgccattagcgatgaaatcatgacgctggaagtacgcttcgcgcaccataatataaggatcggagctctgacgcagcagaccatcggaatccagcagctgagcgcgggtttcgatcccttcaagcgtccatttacccacagacatcggccaggtcagccaggaaagaaccgggtaaaaaccatccgccatatcaccaccgtcatcacgcagcgtgaagctaccgtagaacggtaactgaacgtaaggcccataacccacgccataatgaccaagcgtactaccgaagcggtgaggttcagtccgttgcagtttcgggttcgccatccctgcaacatcaataaaaccgcccatccccaaaatggtgttcaggaaaaagcgggtaaagtggaccatcccctgataagggtcgccctgcaagaagtagttaaccatcaccgcaggttcttcaaggttgccagtaaagttgctcaaaccgttacgcgccggttgcggaacataatcacgccaggcgacagcgaccggtcgaacaatatacgggtctaatacattgaagttgaagttgtacatggtgcggttgaacccttctaacgggtcagaacgcccttgctgatctgtaccggaactcgcacaccccaccagaagcgtagttcccagagcaagcgcgctcaggcgaagcttcataaatgtctccctgtttttttatggcttatgcagtttgccatccatgacggaacgataccgtatccgcctgtttaggtgtgggcgattgtaacagcacgtcaactgatgtccagacgccctgatttgctgatttgatcatagcctggtaatcgccgccctgtaggctacttgattctatagaaacagaaaaaggcaaacgcagccttttctacattttcagagtaactcccgtcagttgcgagcaaaaaagccgctacgctttagctatacgtgctaattcaagagaagagaccatggacaacgacaaaattgatcaacacagcgacgaaattgaagttgagagcgaagaaaaagagcgcggcaaaaaaatagaaatagatgaagaccgactcccctcccgggcgatggcaattcatgagcatatccgccaggatggtgaaaaagagctggaacgcgacgcaatggcgctactgtggagtgccattgcggcgggtctgagcatgggcgctagcttactggcaaaagggatatttcaagtcgaactggaaggtgtgccgggcagcttcttgctggagaatctcggttatacctttggttttattatcgtcattatggcccgccagcaattatttaccgaaaataccgtgactgcggtactacccgtcatgcaaaaaccgacaatgagcaacgtcggcttacttatacggttatggggcgtcgtgctgctgggtaatattctcgggacaggtattgcggcgtgggcatttgaatatatgcctatcttcaatgaagaaactcgcgatgcatttgtcaaaatcggcatggatgtgatgaagaacacccccagcgagatgtttgccaacgcgatcatttccggctggctgatcgccactatggtttggatgtttcctgcagcgggtgcggcaaagattgtggtgattatattgatgacctggcttattgccctgggtgacaccacccatatcgtggtcggttctgttgaaatcctctatctggtgtttaacggtacgctgcactggagcgatttcatctggcccttcgcactacctactttagcggggaacatctgcggcggcacctttatcttcgcgttaatgagtcatgcacagattcgtaacgacatgagcaataagcgtaaagcagaagcacgccaaaaagcagaacgtgcggaaaacattaagaaaaattataaaaacccggcataaatggcgagggtttaagcaatcgagcggcagcgtacttaccccgcactccattagcgggtatactcatgccgcattgtcctcttagttaaatggatataacgagcccctcctaagggctaattgcaggttcgattcctgcaggggacaccatttatcagttcgctcccatccgtaccagtccgcaaaatcccctgaatatcaagcattccgtagatttacagttcgtcatggttcgcttcagatcgttgacagccgcactccatgacgggtaaaaagtggataaaataattttacccaccggatttttaccctagagccatacagcctcacactcgatgaggcctgtcagtttcttaaaatatcctgatctaccatcgccgtcatagagcgtatttttattacctgatttgcaggttcgattccctattcggagatagcactcatgcaacacgaactacagcctgatagtctggttgatttgaaattcatcatggctgatactggctttggtaaaaccttcatctatgaccggattaagagtggcgacctgccaaaagccaaagttatccacgggcgagcaagatggttatatcgtgaccattgtgaattcaaaaataagctcttaagccgcgccaatgggtaaaatagcgggtaaaatatttctcacatctaaaaaacaccattccaatcaatcccctgctgcttcaagtagatgtctgcaggggacaccatccttgtgtttatccctaaaaccacataaaaaccgtaaattaaattcgaactagcaggccgaataaggcacaccaggaactcgtggttttattcattaactagtggtttttacctgttctcttagccagataataaacgcttcaatttttggccactgcctgcccggtaatgtggtgatgtaataatgctgatggcatttcaccgtcatatcgccaaacggcgcgacgagctcaccactggcaagccttttttgtaccaggcgttttcttcccatcgccaccccaatatgattcatcgcggcaataacagctaaatcagaacgatcaaagccaattccagaagatgtcggcaaattaaccgcataatgttgcgcccaactatgccattcatccgtaccggagtcgttgctccatgcctgtctgtcatggagcaacgtacagtgacacaggttaattaccgtgttggttaaagcatgtctttgagcgtattccgggctacatactggcaggatttcttcatccatcagaaagtgatgagtgagttgcgcactcggcgcatcatcaaagtagatcgccaaatcgattccggcacgttgcagattgacgttgtcattaccagtgagcacggtgaggctaatagacggataccggcgtgtaaagtcacctaatgcgggcaccaaccagcattgggcgatagagggccgggaatacagagttaacgttccgcttaactcctgatttttgatatcaagaatttcctggttcagggtatccaggctgctttttagcgcccaataaacacgtttcccctcgtgcgttaattccactttgcgatgggaacgaacaaacaactgaatgcccaattcttcttccagctgattgatacggtgacttaccgcactggggctcaggctcaattcctctgccgccagggcgaaggactgatgcctggcagccacttcaaaagtatgcattttacttaattgccagccgttaagcagccgatttcttatttcacgaaggggttccataatcacctcatttttcgcttaagtgtaaaaaaatagcggcaaaatttcagctatgagatgagctaaagtgaaccatatctcaattcaccttcatttttagatgtaaatcactccattgatgcaatttacctcatgtgaaaggcaaattttatcgtttgtcagcctgcgttgtttttttgtccaatatcatcaggttaatcacaggggaaggtgagatatgcactctcaaatctgggttgtgagcacgctgcttatcagcatcgtgttaattgtactgaccatcgtgaagttcaaattccacccgtttctggcgctgttgctggccagcttcttcgtgggaacgatgatgggcatggggccactggatatggtaaatgctattgaaagtggaattggcggaacgctggggttcctcgcagcggttatcggccttggcacgatactgggaaaaatgatggaagtatccggggccgcagaaagaattggtctgacacttcaacgctgccgctggcttagtgttgatgtcattatggtgctggttggcctgatttgtggcatcacgctgtttgttgaagtgggcgtcgtgctattgattcctctggcttttagtattgccaaaaaaaccaataccagtttattaaagcttgccattccgctatgtaccgcattgatggcagtgcactgcgtggttcctccacatccggctgctttatatgttgccaataagctgggcgcagatatcggtagcgtgatcgtctacggtttgctggttgggctgatggcaagtctgatcggtggcccacttttccttaaatttctgggtcaacgactgccctttaaacctgtacccacagagtttgcagatctcaaagttcgcgatgaaaaaacactaccgagtttaggcgcaacgttattcaccatactgctacccattgcgctgatgttggttaaaacgattgccgaattgaatatggcgcgtgagagtggtttgtatatcttggttgagtttattggcaaccctatcactgccatgtttatcgccgtgtttgtcgcctattatgtgttgggtatacgccagcatatgagcatggggacgatgctcacacatacggaaaatggcttcggttctattgctaatattttgctgattatcggggccggaggcgcattcaacgccattttaaaaagcagcagtctcgctgatacgctggcagttattctctccaatatgcatatgcacccgattcttctggcctggttagtggctcttattctgcatgcggcagtgggctccgctaccgtggcaatgatgggggcaacggcaattgttgcacccatgctgccgctgtatcccgacatcagcccggaaattattgcgattgctatcggtagtggtgcaattggctgcactatcgttacggacagccttttctggctagtgaagcaatattgcggcgctacgctcaatgaaacatttaaatactatacgacagcgacatttatcgctagtgtcgtcgctctggcgggcacattcctgctgagttttatcatctaagcgcaaagagacgtactatggaaaacgctaaaatgaacagcctcatcgcccagtatccgttggtaaaggatctggttgctcttaaagaaaccacctggtttaatcctggcacgaccagtttggctgaaggtttaccttatgttggcctgaccgaacaggatgttcaggacgcccatgcgcgcttatcccgttttgcaccctatctggcaaaagcatttcctgaaactgctgccactggggggattattgaaagtgaactggttgccattccagctatgcaaaaacggctggaaaaagaatatcagcaaccgatcagcgggcaactgttactgaaaaaagatagccatttgcccatttccggctccataaaagcacgcggcgggatttatgaagtcctggcacacgcagaaaaactggctctggaagcggggttgctgacgcttgatgatgactacagcaaactgctttctccggagtttaaacagttctttagccaatacagcattgctgtgggcagtaccggaaatctggggttaagtatcggcattatgagcgcccgcattggctttaaggtgacagttcatatgtctgctgatgcccgggcatggaaaaaagcgaaactgcgcagccatggcgttacggtcgtggaatatgagcaagattatggtgttgccgtcgaggaaggacgtaaagcagcgcagtctgacccgaactgtttctttattgatgacgaaaattcccgcacgttgttccttgggtattccgtcgctggccagcgtcttaaagcgcaatttgcccagcaaggccgtatcgtcgatgctgataaccctctgtttgtctatctgccgtgtggtgttggcggtggtcctggtggcgtcgcattcgggcttaaactggcgtttggcgatcatgttcactgcttttttgccgaaccaacgcactccccttgtatgttgttaggcgtccatacaggattacacgatcagatttctgttcaggatattggtatcgacaaccttaccgcagcggatggccttgcagttggtcgcgcaagtggctttgtcgggcgggcaatggagcgtctgctggatggcttctatacccttagcgatcaaaccatgtatgacatgcttggctggctggcgcaggaagaaggtattcgtcttgaacctagcgcactggcgggtatggccggacctcagcgcgtgtgtgcaagtgtaagttaccaacagatgcacggtttcagcgcagaacaactgcgtaataccactcatctggtgtgggcgacgggaggtggaatggtgccggaagaagagatgaatcaatatctggcaaaaggccgttaataacgtttcaacgcagcatcgcaatcctttccctgggtgagcgatgctgccgatggcgcagacttaagatccccggtcttacccgctataaccccctccttttatcatcacccaacgcctttcgctgtaaacggcggtttcgcaaaccaaaccaaaaccgtaagtaagataaaagcaatagccgccatacggaaaatctcatttgcagaaatagaaagactctgctgggttatttcattattaatttcattaagaactccactaaggctaccataatatttatccataatttgactgctactattaaacacggggttaaattgatcgatggttgctgtcaactgactatggtgtaagctttcgcgtcgtccccacagcgtcattgtcaagctcgtaccaacacttccactcaaggtacgaaaaaaattactcatactgctggcattggcaaatttattatctggcaagccactaaagctaatcgttgttaagggtaaaaagaaacaggcaacggcgaatccctgaaaaaactgcggcaaaatgatgcctgtaaaatcaatcgttggcataaatgtcacagaacgccagtaatagcaaaccgcatacatcaaaaaactaaatgtcactaacaaccgcatgtctattttgttgccataacgtcctatcaaaggactaattaatagtggcatgatgccgatgggcgcataagcaagtccggcccatatcgcattataccccatcgtttcctggagtaactgcggcataaggacgatcgctccagagtaaaataaatacgcgcatgtgatactcacaataccaatggtgaagttacgggacttaaacaaactgagatcaagaatcgggttctcactggtgctctcccaaatgactaaagagatcagagaaataacacttactactgttaatattattattgtactgctgttgaaccaatccagatcgcgccctttatcaagcataatttgcaagccaccaacaccgagcactaacagggtcagtcctggtagattcattttgaccggactagtctcagtttctcttcctttaagtaaggttaagcataatgtcaggacgataatccccatagggacattgattaaaaatatccaaccccagctaaagttatcacaaatataaccgcccaatatcggcccacatatcggagcgataatcacggtcatactccataatgccagagcaaatgttcttttttctggcggataattccttaataataaactctgactcagtggaattaacggccccgccattaacccctgaacgactctaaaaaatatcagcacatcaagattggtgcttaggctacacattaaactagacaggctaaaaaaagtgacactaagtaaaaataatcttaattcgcctattctttgtgccaacctgccagtaacagggatcgcaatggcatttgctacaccaaagctggtgataacccaggtgccttcgtctgtacttgctcccagaaagccagatattgtcggtattgcgacgttagaaatagtggaatccaacatttgcataaatgtcgctaaactcaatgcaatagtgacgcaccataacgtcccaccggttaatggtgccggagtacttttagtgattgccattaaagttgtccattatggctaataatgttgctaatttctttttctatcggactggtatcgataactaaagccttactggtataagccggcatggaggtcacggtactagccagctcaggcatctcggcaatgtcttcgttcttcgtatcaatagttgctgtcatgcttaaaccaatacgcaaggggtgttccatgagttcttttggatcaagagaaacttcaaccggtacacgctgaacgattttgatccagttccctgtcgcattttgtgcaggtaataaggagaacgcattgccggttcccatattgatccctgtcacccgaccatgaaacacaacattttcaccataaagatcgctgataatattgacgctttgaccaatccgtacatccgtgagttgtgtttctttaaagttggcattaacccacatttgacgtgccggtacgacagccattaagctttgtccggggctcactgtttcgccgacctgaacacttctctgggcaatatagccggtaaccggactcttaatatccgtacgtttaagcgccaaccaggcttctttagttgcatccgccgcttcaacgacttgtggctgacggtttaatggtgtgttcattactaaagctttattcgctttataagcctggatagcggcattcaatgccgctttgctacttattaacgtatctttggtatgctccagcgtttctttactaataaccccctgcttcgctaacggcactcgacggttataatcttctaaagattgttgatactgaatacgtgcactagcgacttcggcactgtattgtttatcctgtaagtatagtttattcgtttgccgaacaatatttgccagattatttttagctttattgagtgcgatagtggcatcagttttatccagactaactaaaatgtcaccttgtcgaacgtagttcgtatctttatgattaacgacagtgacactaccactgacttgtgcagaaattggatctgcattccccgtgacataggcgtcatctgtactaatcatgtcttctaattccatactccaataggcataggcaccactaaacgcaataaataaaactaccgccaataaagaaaagtattttcttctgttagaatgttttttattactattaatctgttccactattatctctcatttctcatagatgaaatttatgaattgaatgaaaagagcattcattcttcatatcaaacacagtgcatgtgttgcacattatcccaggaacgttggaggcctaatttaaatgaggtgcaaaaaaaacaacagaggactaaaccgtggcttttgcaatacaattcttacgcctgtaggattagtaagaagacttatagtgccaacttgaaactataaatcatcggtacaatccctgattttattgttgacatttcatttatgccgactatttatatggtatacttgtcgaattatcttaaaggaagctcagattttcttatttttattgagaaaatgagatgacgccttatgtctgtattactacagggagaagggagatgcttcattgcaaagggaataatctatgaacgcaataattattgatgaccatcctcttgctatcgcagcaattcgtaatttattgatcaaaaacgatattgaaatcttagcagagttgactgaaggcggaagtgccgttcagcgggtggaaacacttaagcctgatatcgtcatcattgatgtcgatatccccggagttaacggtatccaggtgttagaaacgctgaggaagcgccaatatagcggaattattattatcgtctccgctaaaaatgaccatttttacgggaaacattgtgctgatgctggcgctaatggtttcgtgagtaaaaaagaaggcatgaacaatatcattgcggctattgaagctgcaaaaaatggctactgctatttccccttctctctcaaccggtttgttggaagtttaacgtccgaccagcaaaaactcgactccttaagcaaacaagaaattagtgtcatgcggtatattcttgatggcaaggataataatgacattgctgaaaaaatgttcatcagcaacaaaactgtcagcacttataaaagtcgcctgatggaaaaattagaatgtaaaagtctgatggatctttacacattcgcacaacgtaacaaaatcggctaaccacatgaagtttttaccctatatttttcttctctgttgtggtctttggagcaccataagtttcgcagacgaagattacatcgaatatcgtggcatcagtagtaacaaccgtgtcacacttgatccactacgtctgagcaacaaggaattacgttggttagcgagcaaaaaaaatcttgtgattgcagtacataagtcccaaacggctacgttgttgcataccgatagccagcaacgggttcgtggtattaatgctgattatttaaatcttttaaaaagagcgttaaatatcaaattaacactccgggaatacgcagatcatcaaaaagcaatggacgcgcttgcagaaggtgaagtcgatatagtgttaagtcatttagttactagcccgcctcttaataatgacattgctgcaaccaaaccattgataattacctttccggcgctggtaaccacccttcacgacagtatgcgaccgcttaccagtccaaaaccagtaaatattgctcgggtagcaaattaccccccagacgaggtaattcatcaaagttttccaaaagcaacaattatctcttttacaaatttatatcaggcattagcatccgtcagtgctgggcacaatgattactttattggtagtaacatcattaccagcagtatgatttcccgctatttcactcactccttaaatgtagtgaaatattataacagcccgcgtcaatataattttttcttgaccagaaaagaatctgtcattcttaatgaagtactcaatagatttgttgatgctttaacaaatgaagttcgctatgaagtaagtcaaaattggcttgatacaggaaacctggcctttctgaacaaaccattagaactcactgaacatgaaaaacagtggattaagcagcatcccaatttaaaggtgctggaaaatccttacagccccccctattctatgacggatgaaaatggcagcgttcggggcgttatgggggacattcttaatattattaccttgcaaacaggtttaaatttttctccgatcaccgttagtcacaatatccatgctggaacacagcttagccccggaggatgggatataatacctggcgctatttatagtgaagatcgagaaaataatgttttatttgctgaagccttcataacaacgccttacgtttttgtcatgcaaaaagcgcctgacagtgaacaaacattaaaaaaaggaatgaaagttgccattccatattattatgagctgcatagccaattaaaagagatgtatccggaggttgaatggatacaggtcgataatgccagcgctgcatttcacaaggttaaggaaggtgaacttgatgctctggtcgcgacacagctaaatagccgttacatgatcgatcattactatcctaatgaactttatcattttcttattcctggcgttccgaatgcaagccttagcttcgcttttcctcgcggagaaccggaacttaaggatattattaataaagcactgaatgcaattcccccaagcgaagttctgcgcctgacggaaaaatggattaaaatgcccaatgtgaccattgacacatgggacctatatagcgagcaattttatattgttacgacattatccgttttattagttggcagtagccttttatggggattctacctgttacgcagtgttcgtcgtcgtaaagtcattcagggtgatttagaaaaccaaataagtttccgaaaagcactcagcgattccttaccgaatccaacttatgttgtaaactggcaaggtaatgtcattagtcataatagtgcttttgaacattatttcactgcggattactacaaaaatgcaatgttaccattagaaaacagtgacagtccctttaaagatgttttttctaatgcgcatgaagtcacagcagaaacgaaagaaaatcgaacaatatacacacaggtatttgaaattgataatggcatcgagaaaagatgcattaatcactggcatacattatgcaatcttcctgcaagtgacaatgcagtatatatttgtggttggcaagatattactgaaacgcgtgatctaattaatgcactcgaggtagaaaaaaataaagcgataaaggctaccgtagcaaaaagtcagtttctggcaacgatgagtcacgaaataagaacaccaataagctctattatgggcttcctggaacttctgagcggttctggtcttagcaaggagcaacgggtggaggcgattagtcttgcctacgccaccggacaaagtctcctcggcttaattggtgaaatccttgatgtcgacaaaattgaaagcggtaactatcaacttcaaccacaatgggtcgatatccctactttagtccagaacacttgtcactctttcggtgcgattgctgcaagcaaaagcatcgcattaagttgcagcagtacgtttcctgaacattacctggttaagatcgaccctcaggcgtttaagcaggtcttaagtaatttactgagtaatgctctcaaatttaccaccgagggggcagtaaaaattacgacctccctgggtcacattgatgacaaccacgctgttatcaaaatgacgattatggattctggaagtggattaagccaggaagaacaacaacaactgtttaaacgctacagccaaacaagtgcaggtcgtcagcaaacaggttctggtttaggcttaatgatctgcaaagaattaattaaaaatatgcagggcgatttgagtttagaaagtcatccaggcataggaacaacatttacgatcacaatcccggtagaaattagccagcaagtggcgactgtcgaggcaaaagcagaacaacccatcacactacctgaaaagttgagcatattaatcgcggatgatcatccgaccaacaggctattactcaaacgccagctaaatctattaggatatgatgttgatgaagccactgatggtgtgcaagcgctacacaaagtcagtatgcaacattatgatctgcttattactgacgttaatatgccgaatatggatggttttgagttgactcgcaaactccgtgagcaaaattcttccttacccatctgggggcttacagccaacgcacaggctaacgaacgtgaaaaagggttaagttgcggcatgaacttatgtttgttcaaaccgttgaccctggatgtactgaaaacacatttaagtcagttacaccaagttgcgcatattgcacctcagtatcgccaccttgatatcgaagccctgaaaaataatacggcgaacgatctacaactgatgcaggagattctcatgactttccagcatgaaacgcataaagatctacccgctgcgtttcaagcactagaagctggcgataacagaactttccatcagtgtattcatcgcatccacggtgcggctaacatcctgaatttgcaaaagttgattaatattagccatcagttagaaataacacctgttagtgatgacagtaagcctgaaattcttcagttgctgaactctgtaaaagaacacattgcagagctggaccaggagattgctgttttctgtcagaaaaatgactaaatagcggctcccacaatgttcaaatgtgggagctatttaccagcacatcttacatttaactactgaactcctggcgaatttgttccccatgctggtcgagcgttgccgctcccggcataacatgcgggtccgcgcagccgctgatttttatcggattacccggcatcattattcccccggcttcaatcaacatatttctcgcctgagtttgtggcaatttaatggcctcagccacacttaataacggcgcgacgggtacaccaacttcatgtattctggctaaccaaacttcagctgcctgcgtttttaacgtccgctcaatatattgtttaagaatagcctggttttgtacgcgtaaaatattgctgctaaatcggggatcattaaccagttccgtaagctccagtgcctggcataacgcagaaaaaagcttgtcattaccacaacaaatcgtaatcggcttatcctgagtattgaaaacatcaaaaggtgccatgtagggatggcgatttcccagacgttgtggactcttcccagttgcgatatatgccatcagaccatgctccagaaaactcagcgtggcatcaaacatcgctatatcgacatgcgcccctctctggctcttttcgcggccataaagtgcactcactattccgctgaataaatagacaccgccgcatagatccgcaagagatgtaccaacgcgcactggcggagcatcaggatatcctgtttccatcattatcccgctcattgcctgaatgatggtatcgtaggcaggagcatcttttagcggaccggtatgtccgaaaccactgctactagcatatatgaggcgcgggttgatttcttgaagcgtttcccaactaaaccccagtttttccattgtacctgggcgaaaattctcagctaatacatcagcttgtttgagcatatttataaatatacttttatcgtgatcattctttaaatcaagaaccacactctctttgccatgattaataaaactgtaatagagactctgtccatccacatagggaccaaatgtgcgggtatcatcaccatgacccggcggctcaactttaattacccttgcgcccatattacaaagaagttgagttccgaaaggtccattaaggacatgtgtcatatcgataactaataagccttcaaacggccctttgctttcattatttgtcatttgcttatgccttgaaaaaagccgaaggtgaaaagacacttcggcatttatgtaaaatcaataacatgattaattaactaaccagtcgactgacataaatccacaagggagccgtgacgacaaagcccagtacgctcacagccaaactcgctgtaccagtacgggtgtagacattaaaccggctggcaataatgattccggagaatgccggcggtaatgcgcctgccagtaccatcatctgcagatgttcgctgttcaaatgacatgccataccaacgagaagcagtgccagtggcatcagaatcagcttcaggaaggtgttataagcaatttcggcactgaactcgaatttatgtgcagccagagtcaaccccgcagcgaataccgctaccccactgttagccttcgcaatcagattaaaggttgggtcccatgctgccggaatttttaccccaaccaacaccaggatcgttgccagaacaggtgcccatactactggctcctttgccgcagaaattaatgcgctcagattactattcttcttaccatccgctccactagaaggattcagcaaatacagaccaataggaatagtaattgcgttaacaataatagaaataattgctaccactaaacctgtacttacggaatcaccataaataggatcgagaactgcaaaccccaggaatccaatggtaggactacctgcaattaatgcacatacagctgcttctgcatgggtacgtttaaaaaatttgtagcaaccgaaccaggagaaaaagaaacatccgacaataaccacaagacttacaagggtcagacgagtgtccgcaaaaatcatttccctgtttgcccgagtaatagatacaaatagagccgcaggaagcgcgtagtttaataccagtttattaaatgcccgagcttgatcttcactaaatgtttctcgtctgccgctaaaataacccaacagcatgattacgataataggcaataaatcgccaataaaaaatgttagcataatagtatttccgataagggtcccctcaccatcgcataatgagttggcaagaggagacgatgtcagtatttaattaccagcgacttgttttgggttaagtttggtaatatggccactttcagttcctgctgcagggtcgatgaccacattaataatggtcggtttgcggctctgaataccggtggttaaagcatgacgaagttcatctgtcgtggtgacgttatagccaacgccacgaaacgcatccattaatttgtcataccttgcatggtgcaacagatccgttggacttggtgcaccagcgccactgagatcaacaccgtctcctctgtagatgccgccattattaaaaataacgatcgtcaccggcaggttatatcgacaaatcgtttcaatttccatcccactgaaaccaaaagcactatcaccttcaatggcgacaaccggagaaccagaagtcacgctagcaccgatggcatagcccataccgatgcccatgacaccccaggtaccacaatccagacgacgacgtggtttatacatatcaataatatttcgtgcattatccagggtatttgcaccttcattaactaaataaatatcctggttctcgcgcaatacgtcgcgcacagcacttaatgcattaaagtaatttaatggttgagtatctgtacttaatttttcatgcattttttgtgcattttgctgcttgtggatatttaaaatatcgcgccataccagtggagtcgtaaatgtgttttgtttcagttctgccagcataccttgcatactggatgcaatatcaccaacgactggcacagcaatggggcggttgctgtcaatttcctgcggttcaatatccagttgaataaactgtgtatctgccgcccatccttttttaccgtgtgccaataaccaattcagtcgtgcaccaacaagcatgacaacgtcagcatttgccagggcaaagctacgcgcagctgccgcagaaagtggatgcgtatcttcaaggatccctttcgccatagacattggcaggaatggaatctgagcactttcaataaattcacgaagctgttcatcagcttgactatacgccgcgcctttgccaaggataattaatggccgttcagcttttgctaaaaggctaattgcgctagtgacactcttcgggcatggcaataatgctgggctcggattttcaactttaacaatcgtggttaacgcttcgtctttttccatcgtcgcggccaggacatttgctggcaaatcaagataaactccgccagggcgaccgcttacagagacccggatagcgcgtgccaatgcaatgccaagatcctgcggctgattaacgcgaaatgctgctttggcatacggttttgccgcattcatttggtccagctcttcataatcaccttgctgtaggtcgacgatcgcgcggtcgctggagccgctaatcatgatcatcggaaaaccatttaccgttgcgttggccaatgcggtcaaaccattgaggaatcctggcgcagaaactgtcaggcagatccccggtttttgggtaagaaaaccgcttgccgcagcggcatagcctgcgctctgctcatgacgaaaaccaatataacgaatgccttccgcctgggcatggcgtgccatatccgtcacaggaatacctacaacaccataaatagtgtcaatattattctgttttaatgcttcaacgatgatatgcataccatctgtcatttgaagttgatcactcatgattaataacctcgaaatttttataaattgggagccagaagcccccgttaatatcagatggcgtggttttgcttcattgcagcaatttcatcgtcgctataacccagctcctgcaatacagcagcggtatgttcacctaatagcggcgcagctttaatatccggcgtaaaggcagagaatttcattggacaaccaacggtcagatattttccacgcaacggttgttccacttcaacaacactgccactttggcgcaaagagggatcaagactaatttctttcatacttaaaaccggtgcacaaggaatatcaaactgagtcaaataggccaccgcttcatgtttatcaatagtgacagtgtatttttcgatttcagcaaaaatatcgaaaatatgtggctgtcgtgcatgggctgtactgtatgccggatcggtaatccattctggtttgccgatggctttacaggtgttttcccagttttgctcctgaatagtgaaataaatataggcgttaggatcggtttcccagcctttacatttcaggatccagccaggctgaccgccaccacctgcattaccaccgcggggaactgcatcaccaaatgtaccattcggatactgcgggtattcttccagatgacccaatttatcgagacgctgctggtcacgtaatttcacgcggcaaaggttcaatacggcatcctgcatactcatggtgactcgttgcccacgccccgttttttcgcgatgcagcaaagcagcaagtaaaccgatcagcaaatgcattccggtgttgctgtcacccaacgctgcagcgcttaccagcggcggaccatcccaaaaacccgtagtggatgccgcgccacccgctgcctgagcaacgttttcataggcttttacattcacataagggctacactcatcaaaccctttgatgctaccaaaaatcagacgtggattgatttcttgaatatgctcccaggtgaagcccatgtgatcaatggcccctggatgaaagttctcgactaagatatcagcttcgcggatcagcttttccattacctctttgccttccgctgttttggtatttaactcaatagaacgtttgttactgttaagcatggtgaagtaaagcgcatcgatatcaggaatatctcgcagctggtgacgcgttacgtcaccaacgccgggacgttcaattttaataacgtcagcgccaaaccaggccagcatttgagtacaagatgggccagattgcacaccggtgaaatcgagaactttaattccttgaagtggagtactcatagcaatacctattagttaattaaatatgtgttaatttagcgtttatttaaggcgtaatatcttctataaataacccgcaaaatatcgtcgtagctgcactcgatatttttaaaatcctgtatcaagtgctgaaaatcatttcatcgccacttccaattcctttctgcatggtaagtagtgaggacgaaaagaagaatatgataaatattgattcgtggtaatcagagagagtcgcgacatttgtgatgttattcttacaactgtaagaagcgccggtgatttacaagcaagggtatgattacgctttttaaagcgtaccataaaacataacataataaatgatttgtgatgacacgggattattgcggtttactttgaggaatataaaatgcgagtttatagcaccgcgagcgccaaataattttatgaccacaacctgtcgtattgtggtcataaaaaattgtcggctggagggagttaaatcctttacctcaatatactgcctgtcagcattagttcacaaacagtgcttcgctatcgacgatgattccatcttccgcacctttaagcgccaggtttgcctcgtagtattgctttttatcaagcagtttctgcgcatcagcaagtgcattacgagtctgtttaagtggcatcagatattggttttccattacgccaacaccggccaggcgaagctcttccattgcgccctttttatcccctttcgccattttttcattggcaatttttatcgcggcttctttttcgggagttgctacataactctcagaaattccgacagatgcattaatgacaatatattggtcatcattgagattggtctttttacctggcttagcgaactttgcccattcggtactgtcatcactcagcaaagcggaagcttcattggtcagttcttttgccttttctggatcgccatgaaacagagccaggcgcgctacctgcacgtcacgcatcgcatataaaccttgttcagagatacgctctgctgccgctgccgttttctgggtttgctgaacttgctgagtttgctgttgtgccgctaccggagcattatcagcagcccatacagtactagatgccagaattgctgtgaccatcgtggccataattaaacgtttcatacttacctcattctttaacagttttagaaaacgccgccatcatattgggtgagcatgaaatgagaaatcagagagcaacggtcattttgaaagggttatcttacagttgtagttattatcgcaagaagtattttagtcttacaattgtaggaatatgcttcctgtcgcagagaactattcttatataccacaaagagatgtcatttattatatcgatgtaaatactgattaattaaatgtaaatacagccataacatcgtaggttctcagtgaaccattttcaggataactttctatgaaagtaaacttaatacttttcagcttatttttattggtctctattatggcatgcaatgtttttgcattttccattagcggtggtggaagtgagaggagctataaagagactgaaaaaacaagtgcgatgacgaccacacactctacaaaacttcagccaagtcaggcgattttgtttaagatgagagaagatgcgccaccattaaacctcacagaagaaatgccgcccccttttccgacaaaggcgaattatcttattcatcctgtgcgataacgtctttcacatggcaggtgaacaatcatgtctgatgctgatgtgaacacctgcccaaatgagccatcctgacccattaccgcctgccataccccaccataaagcgaatcatcaagccacaagccggggcaagaaacataaatatccccgtcactagttcattaccgccagttaaccacatggtgaagtaataaatgagtgcagcgaggatcaccatgccgaagaaagaagagaccgcgcttaccacgttcagtacctgaccgatgtagccgcttacgcagacaatacacagggcgagaaacatccataaattaatcatagctcaacctcctgccgcgctaaaaaacctgtaacttcagtcactttaatagtaagacaatccttaacctctggcaatttttgctaagcatcaatgaaaacagcatgttaaatgcaagactgttgtgtacggaaaaatatttactttgcacgattaataatcagtagctgaaagcagtcagcgagtgataaagtacagataccgcattcatgctcctcgtggttatgtcctgactagtctttacactctttacaggaaccattgtcgtacatgatggcccaaccaattgagtgtaccgctgtcgacatggaatcttctgcgatacaacaattcgtatctacagaaggtaactatgtttccacaatgcaaattttcccgcgagtttctacatcctcgctactggctcacatggtttgggcttggtgtactctggctttgggtacagcttccttatcctgttctctgctttctcggcacgcgtattggcgcaatggcgcgaccattcctgaaacgtcgtgaatctatcgcccgtaaaaacctggaactttgtttcccgcagcattctgcggaagaacgcgagaagatgattgccgaaaactttcgtagtctcggcatggcgctggtagaaaccggcatggcatggttctggcccgacagtcgcgtacgtaaatggtttgatgttgaagggttggataaccttaaacgcgcacaaatgcaaaatcgcggcgtaatggttgtcggcgtccattttatgagcctggaactgggcggccgcgtgatgggactgtgccaaccaatgatggctacctatcgtccacataataatcagctgatggaatgggtgcagacccgtgggcgcatgcgctctaacaaagcgatgatcggcagaaataatctgcgcggcattgtcggtgcactgaagaaaggtgaagcggtatggtttgctcccgatcaggattatggtcgtaaaggcagctccttcgcgccgttctttgcggtggaaaatgtcgccacaaccaatggcacctatgttctctcccgtctctctggcgcagccatgttgaccgtaacgatggtaagaaaagcggattacagcggatatcgtttgttcatcaccccagagatggaaggctacccgacagatgaaaatcaagccgctgcctatatgaacaagattatcgagaaagagatcatgcgcgcaccggagcagtacctctggatccaccgtcgctttaaaacgcgcccggtgggagaaagcagcttgtacatttaacaaactgctcttactctttccctcctcaaatcggccataataacctcatggtttttatggcttttttcttaaggttttttccttcgctgaatatctaattattaccgtcagaaattaaactgtcgccgatatgagacacttgtaagttactaaaagtaaataagaaaatgcctcttgtctcgtttcagttttaggcgtacattagcgccgtctcgagcagtttagctcagaattctggggtgatgcccacggtaaaatacagggcttttaaggtcgctttgcccggtgtcaactcactgtatcaggtgtaatgaagtcattcaggcgtaacagtaattacgcggagagatgtaaagtgaaatatttctttatgggcatttcttttatggtcatcgtttgggccggtacttttgccctgatgatctaaaagcaaactgtgcaatgaaaaacaggagccatcaggctcctgtttgcatttctgacgacggtgtttattccgcgttttcgtgaatatgtttgctgctggcgggtagtaaaccgtcggcacggaacatcgctttaatccctctgatggcctgacgaatacggtcgcggttttcaatcagtgcaaagcgaacatgcgtatcaccatagtcgccaaagccaatccccgggctgacacaaaccttcgcttcgttaaggagcttcttggcaaattccaggcttcccatggccgcatatggttccgggattttcgcccagacatacatgctagccttcggcatttcaaccatccagcccgcttcatgcagccctttaaccaatacatcacggcggcgtttgtactgttcggcaatgtcgcgcacgcactgttgatcgccctccagcgccgcaatcgccgccacctgcaacggcgtaaaggtgccgtaatcgtgatagcttttaatacgagccagggcgctgaccagcgttttgttgccaaccataaagccgatacgccagcccgccatgttgtagcttttgctcagcgtaaagaactcgactgccacatcgcgtgcacccggtacctgcataatactcggcgctttccagccatcgtagacgatatcggcataggccaggtcatggaccaccagcacatcgtagcgtttcgccagcgccactactttttcgaagaactccagttccacgcattgcgcggttgggttactcgggaagccgaggatcatcatcttcggtttcggataactttcacgaatggctcgctccagttcgttgaagaaatcgacaccttccaccagcggcacactgcgtacctgcgccccggcaatcaccgcgccataaatatggatcgggtaacttggattcggcaccagcaccgtgtcaccatgatccagcgtcgccagcatcagatgcgccaggccctctttgctaccaatagtgacgatggcttcactttccgggtcgatttcaacgtcgtagcgatcctgataccagcgggaaatggcgcgacgtaaccgcggaatgccgcgactagtggagtaaccatgcgtgtccgggcgctgggccacagtacataatttttcgacgatatgcggcggagtcgcaccgtccgggttacccatgctgaaatcgataatatcttcgccgcgccgacgcgcagccattttcagttcagcggtgatgttaaaaacgtagggcgggagacgatcaatgcgcgtaaagcgacgttcagggcgagtgtcagccataatttcctcagattaacgttagcgcccggaccgtccgagcgacgctgccacgatggtggctgttttgaaaatagcctgattaatttctgtctgtccagtgttttagaacattttatcaatgacgttaaatgaggaactctgctttaaaaacaggaaatttatctgcgctaacaagaaaattaccactcattctattaacataataatttcaataaatttactaaccagaagtgcattatcaagagatgcattgctaatacaccatttatctatcaatccccttttaaaattgtggtttttcctcaaaaacggcctgctggtcatcagccttcaggttacctatcatagaggtttaatccttattcagagtcacccgtgcacgaaatattcaacatgctgctggcggtcttcgatcgggcagcgttaatgcttatctgcctgttctttctcatccgtatccgcctgtttcgcgaactgttgcacaagagcgcgcactccccaaaagaattgctcgccgttaccgccattttcagcctgttcgccctgttcagcacctggtccggcgttcccgtagaaggcagcctggtgaacgtacgtattatcgcggtgatgtccggcgggattctgtttggcccgtgggtaggcatcattaccggcgtgattgcgggtattcaccggtatttaattgatatcggcggcgtgacggcgatcccctgctttatcaccagcattctggcgggttgtataagcggctggatcaacctgaaaatccccaaagcacagcgctggcgcgtcggtattctcggcggcatgttgtgtgagacgttgaccatgattctggtaattgtctgggcaccaactaccgcgttggggatcgatatcgtctctaaaatcggcattccaatgatcctcggtagcgtctgtatcggctttattgtgcttctggtgcaaagcgttgagggcgaaaaagaggccagcgccgcgcggcaggccaagctggcgctggatatcgccaacaaaacgctaccgctgtttcgccatgtcaatagcgagagtttacgcaaggtctgcgaaattatccgcgatgacattcacgccgatgcggtggcgattactaataccgatcatgtgctggcctatgttggcgtgggtgaacataactatcagaatggcgatgacttcattagcccgactacccgtcaggcgatgaattacggaaaaatcatcattaaaaacaatgatgaagcccaccgcacaccagagattcattccatgctggtgatcccattgtgggagaaaggggtcgtgaccggaacgctgaaaatttactactgccacgcgcatcagatcaccagcagtttacaggaaatggcggtcggtctgagccaaatcatctccacgcaactggaggttagtcgcgccgagcagctacgtgaaatggcaaataaggcagagcttcgcgccctgcaaagcaaaattaatccccattttctgtttaacgctctgaacgctattagtagcagtatccgtctgaatccggataccgctcgccagttgatctttaatctgagccgttatctgcgctataacattgaattaaaagacgatgagcaaatcgatatcaaaaaagagctgtatcaaattaaagactatattgccattgagcaggcccgctttggtgacaagctgacggttatctatgatattgatgaagaggtgaattgctgcattcccagcctgctgatccagccgttggtggagaacgccattgtccacggtattcagccttgcaaaggtaaaggcgttgtcaccatcagcgttgcagagtgcggaaatcgggtacgcattgcggtgcgagataccgggcacggcatcgatccaaaggtgattgagcgggtcgaagcgaatgaaatgccgggcaataaaattggcctgctgaatgtccatcatcgcgtgaagttattgtatggcgaggggctgcatatccgccgcctggagccggggacggaaattgcgttttacattcctaaccaacgcaccccagtcgccagtcaggctacgttattgctttgagccggagtgatattgtgaaagtcatcattgttgaagacgaattcctggcacaacaggaactgagctggctaattaaagagcacagccagatggagattgtcggcacctttgacgacggtctggacgtgttgaagtttttgcagcataaccgcgtcgacgccatttttctggatatcaatattccgagcctggatggcgtgttgctggcgcaaaacatcagccagttcgcccataaaccgtttattgtgttcatcaccgcgtggaaagaacatgcggtagaagcgtttgaactggaggcgtttgactacattctcaaaccgtatcaggagagtcgtattaccgggatgctgcaaaaactggaagcggcctggcaacaacagcagaccagcagtacgcctgccgcgacggtaacgcgtgagaatgacaccattaatctggtgaaagatgagcgaataatcgtcacgccaattaacgatatctattacgccgaagcgcacgagaaaatgacctttgtctatacgcggcgtgaatcctacgtaatgccgatgaacattaccgaattttgcagcaaactgccgccgagccattttttccgctgccatcgcagtttttgtgtcaatctgaacaaaatacgcgaaatcgaaccgtggtttaataacacctacattctgcgactgaaagatctggattttgaagtgccggtcagccgcagcaaagtgaaagaatttcgccagttaatgcatctttaatcgggaactttcatgaaagcaccaggcttgcccgccgatcaacaatttttcgccgatctgttcagcggcctggtgcttaacccgcaactactggggcgcgtctggtttgccagccagcctgccagcttgccggtgggcagtttatgtattgattttccccgtctggatatcgtgctgcgcggcgaatacggcaatctgctggaagcaaagcagcaacgtttggtggaaggagaaatgctgtttattccggcgcgcgcggctaatttaccggtcaacaacaaaccggtgatgctgttaagcctggtgttcgctccgacctggcttgggttaagcttttacgatagccgcaccacgagcttgttgcatcctgctcgccagatccagcttcccagcctgcaacgcggtgaaggtgaagcgatgcttaccgccctcacccatcttagccgtagcccgctggagcaaaatatcattcagccgctggtgttaagtttgctgcatctttgccgtagcgtggtgaatatgccgccgggcaatagccagccgcgcggcgattttctctatcacagcatttgtaactgggttcaggataattatgcccagccgctcacccgcgagagcgtggcgcagttttttaatatcacgcccaatcatctgagtaaactgtttgctcagcatggaacgatgcgttttatcgagtatgtgcgttgggtgcgaatggcgaaggcgaggatgattttgcagaaatatcatctgagtattcatgaagtggcacagcgttgcggttttccggatagcgactatttttgtcgcgttttccggcgtcagtttggtctgacgccgggagagtacagcgcccgttttcagggctaacgtcagaaggttaattctgtttccagcagcgtcaggatactttgtgcatcttgcgcggcaaacaagctctggcggaagtttttattcaccagtttacgcgccagctggctgaagactttcacatgattcatcccttcgttagcacccagcgtcagcatgatcaccagttcgacttcgcccatttcactctgccagccaatcggtttcgccagccgggcaatgctgatactggaatgacggatccactgagatttggtgtgcgggatcgctacgccaaaaccaacgccggtggtaacaatctcttcccgctgccagacatcttcttccagctcaaacggatgttcagtgcgcccgttaacgccgaggttgccgcacaggaactggatcgcctgctctttattgctaaaatcctgatcaacaaagatattctccagcgccagcagtgggcgaacgtcttcttccggcgtaaaggcggtgagtaacgcttcaatttcctgcgcactgcggcattcacatgcctgacgcgccagttcccgacacgcctcgctatccagttgacgaagctggcttttcaccgccggaatacgcgggctactcatactcagctcatccaggcccagcccaagcagtagcggcagataacggctttcaccgcccagttcaccgcaaatgcctacccatttgccccgctgatgcgcagtggtaactatttgctgcaacatgcgcaggaagcttggcgtaatcgggttatatagcgggcttacgcgcgggttattacgatcgaccgcatacagatactgggtcatatcgttggagccgatactgaagaaatcgacctcatcgcagaagtggtcgatgatgtagcacacgctcggaacttccaccatgatcccaagcgtaatcgtctctgcatgacgcaggccatcgcgcttaagctcaacgatcgctttttggatctcgcctttcacccataagatctgatcgaggctgtgaaccatcgggatcatcaactgggcgttgccgaaactggcggcgcgcaaaatggcccgcagttgagtgcggaacaggccagcaaattccgggtaaatacgtaccgcgcgatagccgaggaacgggttctcttcctggggaatattcagataaggaatgcttttatcgccgccgatgtccatcgtgcggaagataatcggcttgtcgcccgccgccagtagcacctgctggtaggcttcaaattgctcctgctcgtccggcgcgctgtcgcgatccatatagagcatttcggtacggaacagcccgacaccttccgcgccgttggcaaacgcgcctggcgcttccagagcggtgccgatattcgccgcaatatcaatacgcttgttatcacgggaataggccagctgcgcggcagcctgcgcctgttgtttttggcgtttatccgccagcgtctgcgcgacctgataataaccgctcaccgcgtcattcgggttaatcgccagcacgccgcactgggcgtcaagcactgcaggttgcccggcataacgggcaatcgcatccagcggcaagccactcagtaccgggatcgcgctggcacgggccagaatcagtgtatggctggtgcgcccggttttctccagaatcatgcccgcaagatttttcaaatcaaggctcaaaaactggcttggggttaaatcttcagccaccagaatggtcggtttttcaagcaccagcttgttgcgcggcttcagttccggccaggtgatatgcagcaactgttcgctgatatcgcgaatgtcgctaacacgttcgcgcagataatcgctggcagaggcagaaagtttggcgcaaacctgctccatattgctgatgatcgccgcccccagcccctgatgctgttctgtcatcaggcgacggatattgcctgcaaattcatcatcctgaatcaggctcaaatgggcgctgaggatagttttgctttcgccgtcacgctcacgcaattgctggttcagttgctcggcaagcgttgccaggctgtgctccagccgggtggaatcttgcgcactggcggggattgcccgataactgtcgaggctgtcgctttgtaacagggtcagcgtacccacgccgacgccgcttgccagcacattgccgtacagtaaatccgggttaaggcggcttaaactacgcggcagcggatgcgccgtcagttctgcctgcgtaggctgaacgctgtcgctgtcgataaagcgcacctggatgtactcttccagcacgcgccgcgcctgctcttcatcgctgccgctaatgttcaggctgcaactgtcattaaatagggtgccggtgccaatcagcgccaggctgcttttcgcatctgcctttgcgttctggcgatggttaataaaagtgatttcgctttgccactggctgcactgttctttaagttcccacgccggacgagcatgtagaccgttaggcaaaggacagagaaattgaatcgttaacataaccgctccgggttaatcaggagatcatctgaaatccgtcagttgaacaaccgtctcacgcgtaagacgttgaataagggcagataaaagttgctgcatctgcaaaatgtcgcggcaatcggcaatgcttgcggcgcaatgtccatggcgggttgctggccccatcaccactgtgggcacgccggtgccggttaagtgcaccgccccgccgtccgtgccgccgttgctgaacatatctgcctgcaacggcacgccaatttctgccgccacggtttcgacccaggcggtaagttttggcggcgcaatcaggctcttgtcgcttaacaccagcatcggcccgttaccaatctggcgatggttagccgcgccataatcaaagtttttcgcccagcaggcggtatcaagcacaatggcgacgtccgggctcaccgcgcgggtggcagtttgcccgccgcgtaatcccacctcttcgctggaacttgccaccagccacacttccgcaggtagttcggcgtcgtgcagttcgcgcagtaacgtcaccagcagatagcaaccgaggcggtcatcaaaggctttccccatcactcgctggtgagggagaacctgaaaagtggtatcaaacgtgacgcgatcgccgggacgaattcccgcctgcatcacttcgtcataggagcgcgcaccaatgtccacgcgcatggcgctgacgtcattcccctgccggtcgccgtcaagcaggcctggaattttgcactcttcacgggtggtgatgcgcaccggctgcagctggcgggcagccatgcgtacgttgccaaccggcagcacatcaatcgccccttcgcgggagatgctgcgcaccataaatcccacttcgtccatatgcgcacagatcatcaccttcggacctgtgctttcattcaggcggatcagcacgcttcccagaccatcaaatcgcacttctttttgcaggcgatccgcttcttccagcaggatctgccgcacttcctgttcgctggaggcgatcgcatctgcctcgctcaacgcttttaataggcttaaatccattatgcctctcccgtgagcaacactgttttcggcatggcgtagagcacttctgcgccttgcggggtaaccagcacaacatcttcgatgcgcacgcccccttgccctggcaaataaatccccggctccacggtcagtaacatgcctggctgtagcgtcgtggtgtcccgcggactaaaacgcggatcttcatgaacttcaatgccgatagcgtgaccggtgttatgaccgaaatagtcgccataacctgcttctgtaatgacccggcgcgcggcatcgtcaacctgctggcagcgcacgccggggcgaatcgcggagattgctgcgagctgtgcctgcaggacaatttgatagacgttaaacagcaggtgagattcggcgctcaccccttcgccattcaccagcaaggtgcgcgtcatatcagagcagtagccctgatacagcgcaccgaaatcgagagtgacaaactcgcccgctgcaacaatcttgtcgctggctttgccgtgcggcagcgccccacgccagccactggcgacaatggtgtcaaaagaggctttttctgcgccctgctggcgcataaaccactccagttcagcggctatctcgcgctcgctcatccccgcctgaataaagcggcgaatatgctctgcaccgcgatcagcaatcccacaggcgaggcggattttctccacctcctctggcgttttgatttgccgcagcacatccggcgtggcgctaaccagtttcgcattgagttcagactgccagcggtgcgcggtttcccaactcacctgctggccctcaaaaccgagcgtttgcaactgttcatcggcaatgatttgattgacgatagtggtaagcgtgttcgtcgcgtcaagcaaatgcagctggtagccttgcgcacgggcttccacctcaacgtaatagcggctatccaccagaatgtgcgcactttcacggctaatcaccacataaccacttccggtggagatccccagatgcggctgtttgttctgccgactggagagaagcactgcatccagttgttgcgccttaagccagtcgcgcaggctagcgagtaatgtcatctggattttccttcttacaggctatcgattaacaatttgcctttacggaacatcatcagacgcaggaacaccaccatcagcgcagttatgactgcccccagcgcgatccccgccatatagacgcccaggttagtgaccagcggccatgcccagatagcggactccgggaaccattgcactgcgcccagccagacagcggcggtactgccgacaatagcgccgaccatatagctcggaatggcggtgatagggctttccagcgcaaacggaatcgcaccctcactgatccccataaacgccaggaacatggcggtcttaccctgcggataaagttgagcgttgaacaggcgtttgccggttaaacgacggtcgataatggtcgccagccccagaccaatcggcggaataacgatagcgatagaacgagcggtgaccggtaatacgtggtcagtggtaaagctgaaggcaacaaaacctgcggctttgttgatcgggccaccaaggtcgattgctgtcgccgcggcgatccccattgcgtacatcagcgcgcccttctcacctgcggcagtcagcacagtacggataccgccgttgatccagccaccaaagggggtgatgacgtagtacatcgccagcatgacaaaaatggcggaaagaatcgggagcaaaaatgtggttttgaacgctaacaggaaatccggtaactggattttctggttcatccacttcacaaggtaaccggcaacgatagaaataatcagcgcaccaatgaaggtggacggcaccgggctagaggtcgcccattgcatagtgctgggatcgaagttcagcagttgcgtcggctgggtagacatcaacccgccgataaaaccagccgggaacgccagtttgccaccgatagagttcgccacaaaagcagcaaacatcggaatggcaaaaccaaacaacacgccgccgaaggactggctcagccaggcaaatttaagtaaggagaggtcgaaaccggagaatttcccgctattaagagcatccatgatgccgatctcagcaggaattttaagccagctataagcaatcagctggctgaaagcgaggatcacaccgcccataattaaggtcggcaccatgcgactaatcccactcatcacatgctgcgggagttcaccccagaagctggttttagaggcctgcggattcttaactgccgctgccgcaccggatgcgccaggcacaacggttgcactgcgttttttaatggccataacaattatccctgtcgaatattactgttgttcagaggcaatcatctcttcgatttctttgatgatgcccgcagcgtttttaattgcgtcctgcaaagtgatttcataaacgtcgcgactttcgaaacgttcgttatcttccggggtaactgccacggagtggatgatgatggtcgcttcggcgatatcctgcgccgtcaggcgattctggataccgtccgcgccctgggtttcaattttcacttcataaccggcttctaccgccgcttcttccagcgcctgagcggccataaaggtgtgagccaggcccatcgggcaggcacataaggcaatcagtttcttactcatcgttaattcctcgttcagtgatagttgacgagtgaaattatgaacgtgcaaaacaaatcgccgttaccagacaaataatgcatttactggagaattaatcccgctgtacggaagtgtgacgcaggtcgaccttgtgaggggacacaaagaaaaattgaataaactgtatgatttaaaagattatcgggagagttacctcccgatataaaaggaaggatttacagaatgtgacctaaggtctggcgtaaatgtgcaccggaaccgagaaggcccggattgtcatggacgatgagatacaccggaatatcatggacatattctttaaagcgccctttatcttcaaatgcggcacggaaaccggaggctttgaagaactcaaggaagcgcggcacgataccgcccgcaataaacacgccgccaaatgtcccgagattgagcgccagattgccgccaaaacggcccataatgacgcaaaacaggctcaatgcgcggcggcaatcggtgcagctgtcagccagcgcgcgttcggtaatatcttttggcttgagattttctggcaggcggttgtcagctttcacaattgcgcgatacaaattcaccagcccagggccagaaagcacgcgctccgcgctaacatgaccaatttccgcacgcaatatttcgaggataatggcctcttcttcactattcggcgcaaaatcaacgtgaccgccttcgcctggcaagcttacccaacgcttatcgacatggaccagatgcgcaaccccaagccccgttccggcaccgtaaaccgcaataggcttaccttcgaccggttctgcgccaccaaactgaatcagatgctcttttttcagcatcgggatcgccatgcttacagcggtaaaatcgttaataatttccagatggctaaaaccgagattctttttcatttcggcaatactgaacgcccaggtatggttggtcatcgccacccagtcaccggtaattgggcaagcgatggcaatacagccgtctttcacctcgaccttatgttcttcaagataaacgcgaatgaccgcttcgaggctggggtaatcaagcccactataggtcttagcctggctgatttcaccactggcaatatcacacagagcaagacgtgcgttggtgccgcccacatcaccgactaatgcatactttgtcattcttcaactgctccgctaaagtcaaaataattctttctcacactgtaaatacctgggggcataacaacaacgccggaaaggcaggctccctgtaaatatcgatctgggtcacacaattactttatcgtttcagcaccaattgcagcgatgcctttttgcaagctgggcaaactaagtatctgaccccgcataaggaatagaacacaggcggcactaacccggacgtagactgtattacaaaagcggcaaaaagcagagacaaaaaacccccgctttgcagcgagggttggaaatttggtggagctaagcgggatcgaaccgctgacctcttgcatgccatgcaagcgctctcccagctgagctatagccccacgatgcgtttacgtaccaagtttgctgggtgcaaaatttggtggagctaagcgggatcgaaccgctgacctcttgcatgccatgcaagcgctctcccagctgagctatagccccgtcacgtaaagcttgtcgagttgacgggcggcatcatatgaattccgcccgaatgtgtcaacggcaaattgcaacgtgtagtttcaatcgctgaaaaatcaggcaaatgaacaattttggaaaaccgctcgcattcagtagttattcatgtcacggtttcctgtaaagtggtgttataaaatgaactactaatagacccacatacattcagggaattgttatgttcaaggagaggatgacaccagatgaacttgccagactgaccggctatagccgccagaccattaataaatgggtacgcaaggaaggctggacaacgagtccaaaacctggcgtccagggtggcaaagcccgactggttcacgtcaatgaacaggttcgtgaatatattcgcaatgctgaacgtccagaaggtcagggagaagcgcctgccctttctggtgatgcgccgcttgaagtattgctggtgacactggcgaaagagatgacgccagttgaacaaaaacagtttacatccttgcttctgcgggaagggattatcggattgttacaacgcttagggattcgcgatagcaaataatatgaaaagattacgcaataaaatgaccaccgaagaactggctgaatgcctcggtgtggctaaacaaactgttaaccgttggatcagagaaaaaggctggaaaacggaaaaatttcccggcgtgaaaggcggtcgtgccagacttattctggtcgatacgcaagtttgcgagtttattcagaacacgccagccttccataacacaccaatgttgatggaagctgaagagagaattgctgaatacgctcctggagcacgcgccccggcgtatcgacaaatcatcaacgcgatagataatatgacagacattgagcaggaaaaagtcgcgcaatttttgagtcgtgaaggaattcgcaatttcctcgcccgtctcgatattgacgaaagtgcataaataaaaaacggcaggatattatctcctgccgtttatctttttacacgctaattactgctgattttcgcgttcagcaataaaatccagcgctttgttgatacgctcgatactgcgggtcttaccaattgcgtgaacggtaacatccagtgctggagactgccccgcaccggttacggcgacacgcagcggcataccaactttacccatacccacttccagctcatccgccgtcgcctgaatagcgtgatgaacgttttcagcggtccagtcagtaatcgcggccagtttgtcacgaaccacttccagcggctgacgcgctaccggacgcagatgttttttcgcggcgtcggcatcgaactcagcaaaatcttcgtagaaataacggcagctctgtgccatctctttcagcgtcttgcagcgttcgcccagcagtttcaccagatcagccagctgcgggccgttacgggtatcgatattttcctgctcaatgtgccactgtaagtgagtagcaacatactccggcggcagcgcgttaatgtagtgatggttcagccacagcagcttgtcggtgttgaacgcactggcagatttgctgacggcattcaaagtgaagtatttgatcatctcttcacgagtgaagatttcctgatcgccgtgggaccagcccagacgcaccagatagttcagcagtgcttctggcaaataaccgtcatcacgatactgcattacgctgactgccccgtgacgtttggacagttttttaccgtcatcgccattgatcatagaaacgtgcgcgtaaaccggcaccggcgctttcagggccttaagaatgttgatctggcgtggcgtgttgttgatatggtcttcgccacggataacgtgggtgatttccatatcccagtcatcgacaaccacacagaagttataggttggggaaccatcggtacggcggataataagatcgtccagttcctggttgctgaactcgatcggaccacggatctgatcgtcaaaaacaacagaaccttcctgcgggttagcaaaacgtacaacacacggttcatcatcagcatgatgctcatggctgtggcggcagcgaccgtcataacgcggcttctcacctttcgccatttgctcttcgcgcagcgcttccaggcgctctttagagcaatagcatttataagcagtgccctcttccagcatctgatcgatcaccgcgttgtagcgatcaaaacgtttggtctggtagtacggaccttcatcccactccaggctcagccagttcatgccatccataatggcttcgatagcttccggcgtggaacgctcaagatcggtgtcttcaatacgcagcacgaactcaccgccgtggttacgtgcaaaaagccaggagtaaagagcagtacgcgcgccgccaacgtgcagatagcctgttgggcttggcgcgaagcgagttttgattttcatgaaatggccttacgtttagaaagatgccgacaaccggcaaatcctggaaaaattaagtgggcgatattctatcactcccgcctgattcctcaatgtagttcgggtttctaccttacgcattattgttttcgttgacaaattgcgcaacacggtctgttttgcgatcatcttgcttaaatttacgacgaacgaacaatttctttagaaaatgcgttgactcattttgaactctccctataatgcgactccacacagcgggggtgattagctcagctgggagagcacctcccttacaaggagggggtcggcggttcgatcccgtcatcacccaccaactactttatgtagtctccgccgtgtagcaagaaattgagaagtgggtgattagctcagctgggagagcacctcccttacaaggagggggtcggcggttcgatcccgtcatcacccaccactttctcgccagctaaatttcttgtaaaaatgtgaagtaccgaagtgggtgattagctcagctgggagagcacctcccttacaaggagggggtcggcggttcgatcccgtcatcacccaccacttcgggtcgttagctcagttggtagagcagttgacttttaatcaattggtcgcaggttcgaatcctgcacgacccaccaatgtaaaaaagcgccctaaaggcgcttttttactatctgcgatactcaaagattcgaacctgcagcaggtttgagttgagcgcagcgaaacaacggagccgctcgtgctggcgacggcccgaagggcgagcgaagcgagtcatcctgcacgacccaccaatgtaaaaaagcgccctaaaggcgcttttttgctatctgcgatttgcgaaattgcctgatgcgcttcacttagcagactactatttccggcaattcctgtctcctcacttactgtgtcaatgcagccaacagcttaaccatcgcgggcgtcacctgctgtgtttcataaacaatatataaatctgcagggatgcgctgtttgagcggacggaaaatgacacctggccagttcatttgtgcgtagctgtccgctatcaatgtgataccaatgcccatactgaccatagcgagtaccgtttgcggttcattaacttcgcgaataacaaccggactaaatcccacctgctggcaaactcgctgcaaaaaatcccagtcagtgtaaacgggcggcattgtaacaaaatactcgtcacgtagcgcttccagcgggacggtggaaaaactactgagatgatgctcttcaggcatcgccaccagaaacgcgctttcatgcaaccgtaagctggtaaaaccagtcggtggttctgtcgccattcgccagatcccggcatcaagttcgcggcgttccagcaaggccatttgcatcgcgggcatcttttcgcgaaaaagaacgtcaacgttaggattttccctgaggaatcgccgcataaccgggcgcatccgtccccacattgccgttcccactacgccgagttcaatccgccctgcttctccccgacctatttgttcaatccgagccaatacattattagcattcaccagcaatcgacggctttcttccatcaagattttgcccgcgtgtgtcagtacgacgctgcggctatggcgaataaaaagctgcgtgccgagttgattttccagctctttaatatgaatgctgagcggaggctgagacatatttaaacgcgctgctgcgcggccaaaatgcaactcttccgctacggcaagaaaataacggagcaacttaagatctgttctgtatacgcgttccataattaagtgctccatataataaatacatcgtattaaattatcatggcataaagtatttcaccaccagatatccgacatacataaacacaatggataatatacccggtaatacatttggtacaggaataggcaagcgcacgattgtaaacaaagcaccaataccaaaaccaacgccggaagaaaataaaatatctttcactaattaacctttatcataaaagcagctctgaagagcagagccgcgaatccttttaatgagtcaccgctcgatgctttatcttttcagggtcatgattatatttaaacccaaagaaaaatatcactgcgagaaaaagagcatatcctgcaaacaccagccagatagtttgccagtcttttacgccatccacgctaaagtaatctactgccatgccactcagaatgctgccaacccatgcgccgacaccatttaccatggtcataaagagcccctgcgcgctggcacgaatgctggaatcaacttcctgttcgacaaatacgctaccagaaatattgaagaaatcgaatgcacagccataaacaatcatgctcagcagcagcaaaataaatccggttgtactcggatcgccataggcgaagaagccaaagcgcagcgtccaggccaccatactcatcagcatgacggttttaatgccaaatcgctttaaaaagaatgggatagtcagtataaagcccacttctgccatctgactaacactcagtaaaatggagggatatttcaccacaaaactgtcagcaaactccgggttacgggcgaaatcatgtaggaacggattaccaaaaacgttggtaatttgcagtaccgcacccagcatcatggcaaagaggaaaaagatggccatgcgtggatttttaaacagcacgaaggcatccagacccagcttgctggcaaggcttgtggtcgcttttttctccgcaaccggaatcttcggcaaagtcagcgcataagcgctcagcagcaaactcgcaccggacgcgatatacagctgcagactactcaattccagatgcagcaggcttactgcccacatcgcgacaatgaaccccaccgtaccaaaaacgcgaatgggcgggaaagcggtcaccgggtcaagccctgcctgggcaagacaggaataagagacgctgttgcttaacgcaatagtcggcataaacgccatcgcattgactaacatcacccaaaacatcatatccggatcagttacggatgccgcataaaaaagtacgcccgcacacaccaggtgacacagcatgtatgcacgttctgcgcgcagccatttgtctgcgatgatccccattataccaggcataataatcgcggcgatccctttggaactgtaaaccatgccaacattagcgccggtgaaatgaagagtattaatcatgtaagagccgagggtaaccagccagctcccccagataaaatattgcaaaaaggacattacctttaagcgcatcgcgatgctcataatcgtttccttgtcgcatcatttggcctcacccgcgaggccgtttcttattgtttttctcaggcaattttgcgcagaaagccacaaataaggttgatgaagttctgcttagagagctccgcagccgccagcgtttgcgcatgactcaatttcacatcgcttaaaccttccgccatattggtaatcgcagagaccgcaacgactttaaggtcgcaatggcgagcactaataacctcaggcaccacagacataccaacaacatccccaccaataatttgcatcatgcgaatttccgccgcagtctcgaaattcggccccggatagctgacgaacacgccctccgtcagagggaaaccctcctctttcgccactttttgtaacagtgcgcggtattccgcatcgtaggcatttgccagactgaagaagcgctctccaaaacgatcatcgttaagacccaccatcggcgtaccgggcatggtgttgatatgatctttcaatgcgaccaggctgcctgcccccacttccggacgcaggctgcctgccgcattggtgcagaacagtagctcgcagcccagcagcttaaaggtacgaattgcgtcagtcataatggtcattccacgaccttcgtagaaatgtccgcgacctttcatacataccaccggtacgccctggagatggcccagcactaactcccccgcatgaccatgtaccgtacttaccgggaagcccggcagcttttcgtaggaaattgcgacagcgttctcaatctgatcggccagcgcgccgagcccggaacctaaaataaaggccactcgtggcgtgaaatcaggtttataagtcttgataatatctatgcaaaacagcgggttatgagaaaattgaacctgagacatacatatcctttttctgtagggtggaatctaacgcctttttatagcgaggttgtcccggctcttaccaatacacttttctcacgcattcaatagcgattcgatatcgatggatttatatcttttttctattaatccacggtaaaaactgtattggcgatattaattcctttgcattaacaatatgtcgtttttagcaaaccactttattaagcaatctactaataacgatcggcatagggaattatgctatgaaaaaacatcttttaactctgacactttcctctatattagcgatacctgttgtatctcatgcagaatttaaaggcggttttgcagatatcggcgtgcattatctggactggaccagccggactaccgaaaaaagcagcaccaaaagtcacaaagatgattttggttatcttgaatttgaaggtggcgctaactttagttggggagaaatgtacgggttcttcgactgggaaaacttctataacggtcgccataataaaccaggtagcgagcagcgttatacctttaaaaataccaaccgtatttacctgggtgacaccggatttaatctctacttgcatgcgtatggcacctacggttctgcgaatcgcgtgaatttccacgacgatatgttcctgtacggtatcggctacaatttcaccggcagcggttggtggttcaaaccgttctttgctaagcgttatacagatcaaacctattacactggcgacaacggctatgtcgccggctgggttgcaggttacaactttatgctgggcagcgagaaattcactcttaccaactggaacgagtacgagtttgaccgtgacgctacctatgcagcgggtaatggcggtaaagaagggctgaatggcgcagttgcactgtggtggaatgcaacaagtcacattactacggggattcagtatcgatatgcggatgacaaactgggcgaagatttttaccaggatgcgataatctactccatcaaatttaacttctgattgattactgccggggctcccggcagtatgaattcactttatatctgatacaacggatccccttcccgcccagccattagcgcattgccctggtctcgtaccacgtcccataaagcttcagcggcggtggaaagactacggttcttcctgcgcaccagcatcaactggcgttcaacaaccggcgtaatgcgctttaccaccagtgggctaccttcaggcaatggtagcgccagtgcgggaagaatactgatgccgatgcctgcggctaccatcgggaacagcgtcgccggatgtccaatctcctgcacaatattcgcctgaataccattgcgcgccagcgctgcgtcaatcagcggtcggctgccactcgcgtaatcctgcaacaccaatttcgctccctgtaatgcctgccagggtacataatcttccacggccaaagcgctatcgcgatggcaaagcagaaagaaaggctcggaaagaatcgcttcacattgcagatcgcccactgggcctggatcgatgacgatgccaaaatcgacatctccctggcgaatactttccattacccactgctgcggacgatcgtgcaggacaaactgaatatctggatagcggcgatggctttcagcaatgcattgcggaataagatgcgcggaaatggtctggctggcagcgacccgaacttttccgctcagttgttgccccatacgcccggtatcgcgcaacgtgctgttcagttcatccagcagtcgctcaagacgcaaagccagctgctgccctgcatctgtaagcaccacttcacgcgtggttctgtccagcaggcgaacaccagtatgattttccagttccttcacactgtgactcactgcgctctggctcaggccgatacgctctcctgcacgactaaaacttttctcctgcgctactgtgacgaaaacctttaattgttttaaagaataattcatctgttttcttcatgaatggatgcaataaatcaattttatttctcaaactggaagaagcacaatagaaccatcgatcatctggagtctttatgaaactttttcgtatcctcgatcctttcaccttaaccctgatcacggtggtgttgctggcctctttctttccggccagaggcgatttcgtccccttctttgaaaatctgaccaccgcagctattgccctgctgttctttatgcacggcgcgaagttgagccgtgaggcgattattgctggcggtggtcactggcgactgcatttgtgggtaatgtgcagcaccttcgtgctgtttccgattctgggtgtactgtttgcctggtggaaaccggtaaatgtcgacccgatgctctactccggttttctctacttgtgcattctcccggctaccgtgcagtctgcaatcgccttcacgagtatggcgggcggtaacgtcgcggcagcggtttgttctgcgagcgcatccagcctgctggggattttccttagtccattgctggttggtctggtgatgaatgttcacggtgcagggggcagccttgagcaggtcggtaaaattatgctgcaactgctgctgccgtttgtgttggggcatctttcccggccgtggattggtgactgggtgagccgcaataaaaaatggattgcgaaaactgaccagacgtccattctgttggtggtttatacagcgttcagcgaagccgtcgttaatggtatctggcataaagttggctggggaagtttgctgtttatcgtggtggtcagctgcgttcttctggctatcgtgattgtagttaacgtctttatggcacgccgactgagcttcaataaggcagatgaaattactatcgtcttttgtggtagcaaaaagagtctggcaaatggcatcccgatggcaaacattctgttccccacaagcgtgatcggtatgatggtgctgcccctgatgattttccatcagatccaattgatggtctgtgcggtgctggcgcgtcgatacaaacgccagaccgaacagttacaggcgcagcaggaaagcagcgccgataaagcttaaagcggacgcttcaggggctggaccagttgcgtcagcccctcggttttaatcagcagcgtgatttgcattagctcaccgagcttccctgccgggaactcatctttgcgggcaaaccacagcagatactcctccggcaggtcgattaagcgacgccctttgtatttgccaaacggcattatcgtattggctatttcaatcagctgctctttttccatctcagctacccagcaaacgcagcatttccgcttcgtcgatgacttcaatgcccagttcctgcgccttcgccagtttagatcctgcagcttcacccgctatcaccagatcggttttcttgctcacgctgcccgcgactttcgcgcccagttcgaccagtcgagctttagcgtcatcacggctcatctggcttaagctgcccgtaagcaccacggttttaccagcaaacgggctgtcaatctcttccgcgttgataacgatcggcgcaggccagtgaacaccttccgccaacagctcgctgatgacattgcggttgctttcttcggcaaagaagttgtgaacgtgggatgcaacgacaatgccaacatcaggcaccttttgcagctcttcaatgctagcggcttccagcgcttccagcgtgccgaaatatgccgccagacctgctgcggtggcctcgccgacttcacggatgccaagtgcatagaggaagcgagcaaaggtggtttctttcgctttttccagcgcgttaaccacgttttgtgcgctttttggccccatacgctccagtccggtcagtttgcctgcggtgagtttgaacagatctgccggagtatggacatattctttttcaaccagctgatcgatgattttgtcgcccattccgtcaacatccatcgcacggcgggaaacaaagtgtttcaggctctctttacgctgcgcaccgcaaatcaggccaccggtacagcgggcaaccgcttcaccttccacacgctcaacgtcagaaccacataccggacaatgcgtcgggaatacaacctcacgggtatcttccgggcgttcagaaagcacgacgttaaccacctgcgggatcacgtcgccagcgcggcgaatcaccactttatcgccaatgcgtaaaccaagacgttcgatttcatccgcattgtgtaaggttgcgttactcaccagcacgcctgcaacatggacaggttccagacgcgcaacaggcgtaatcgcgccagtacgcccaacctgaaactcgacgtcacgcacaaaggtcatctgctcctgcgccgggaatttaaacgctaccgcccagcgcggggcacgcgcgacaaagccaagctgctcctgctgtgccagactgttgaccttaatcaccacgccgtcgatatcaaagcccagcgtcgggcggtcttcttccactttgtgatagaacgccagcacttcttccgcgctttcacaaagcgttacccgatcgctgaccggcaacccccactttttaaattgcagtaaacggccaagatgagtatccggcagctcgccaccttccagaacaccaacgccatagcagaaaaaagtgagcggtcgcttcgctgtaatacgcggatcaagctgacgcagactaccagctgccgcattacgtgggttagcaaacactttcccgcccgtgcgtcgcgcatcttcgttaatcttttcgaaccccgcctgcggcaggaacacttcaccacgcacttccagacgcgccgggatattctctccgtgcagcttcagcggaatggcgcgaatagtacgcacattagacgtgatatcttccccggtggtgccatcgccacgggtcgcggcactgactaaaacgccattttcatacagaatactgacggcaagaccatccagcttcagctcacagcaccaggtgactttctcgttgtttttcagacggtcctgcacacgtttgttgaaagcaagaaagctttcttcatcaaaaacgttatccagactcagcattggtacttcatggcgtatctggctgaaagccgccagcggcgcagcgcctacacgttgagtagggctatcaggcgtaatcagttctggatgtttggtttccagctcgcgcagttcgcgcatcagcctgtcgtattcagcgtcgggaatttccggcgcatccatcacatgataaagatattcatgatggcgaagcgtcgttcgcagttctgtcagttgttgttcgatactttccatatcgcaccatcaatgctaaaaacccccgacaagcgggggttcgaagaggagttaatttgccttaagtgtatcaggcgttggcgtctttgacttcgcggatgatgtcctggtactcgcgcaatttctgcggagtcatcatacggcgctgatcgtcaagcacgacaccgcccacttcatcggcaatatgctgcgcagattgcagcatcagcttgaagttctgcagctcgtcaccgtaagacggtacctgcataaagatagtgacacccggagtagtgaaatccttcatttcaggatcaaaggttcccggtttcaccatattcgccaggctgaataacgccgggccgctgccatccgggctaagatgacgatggtaaatattcatatcgccaaaaatgaagcccgcttgttgaatgctgttaagaagcagttcaccgtttagctcgctaccgtgatgcgccgcgacgttcatgataatcaccgcttctttgcgcttcggtttatccataactggagcaggttccgctacaggctcaggctgtggtgccgctacgggttctgcaggctggaaagcctgttgtgccggttgcggtgcactatgcacaggctgcggcgctggcgcgacctgtgggctaactggctgctgcaacggctgttcaggctgcggctgataggcaggctgctgcaccggctgcgctggatgcggagcatgttgcggcggtacctgcgcttcaggcggctgctggaccggttgacgcggctgcgcagacgcataaggcggttggtactggtgttgcgggctcggacgagcagcctcatgctcctgagcgttagccggggcatgattcacgcggtgaacacgaacctcaccaacgccctcatcatcttcgacatcctcgtcataagaatcgtcgtcacgtttactcttcattcgttttaatggccgatcgcggaacatagaagatcgttctttacggctggtccagaaaccatgtaccagtaaagcgattatggcgatcgcgccaacaatgattaatatcagacgcaaatcctgcatcattatattctctgttgttctaacaccttgccaccacggcaaacatttactcactaagagtatttgccgattacctcaagtgcaagtgcactattaactttcacagcacaaagatagatgaaatcgtgctttttgctgttttttcgaacatatcctaactgtccattgcgcaattacccggtaaaatacgcagaattttcctgggattggtcaaaaggagctcatcctgattatggttagtagtttcacatctgccccacgcagcggtttttactattttgcgcaaggctggaagctcgtcagccaacctgggattcggcgtttcgttattttaccgctgctggtcaatattttgttgatggggggcgcattctggtggctctttacacagctcgatgtctggatcccgactctcatgagttacgttccggactggctacaatggctgagttatctgttgtggcctctggctgtcatctctgtgctgttagtgtttggctatttcttctccacgattgctaactggattgccgctccgtttaacggtttattggctgaacaactggaagcacgattgactggcgctacaccgccagataccgggattttcggtatcatgaaagatgtgccgcgaatcatgaaacgcgaatggcaaaaatttgcctggtatctgccgcgcgcaattgtattactaattctttacttcatccctggtattgggcaaaccgtcgcgccggtactgtggttcctgtttagcgcctggatgttagccatccagtattgcgattaccccttcgataaccacaaagtgccgtttaaagagatgcgcaccgccctgcgcacacgcaaaatcaccaatatgcagtttggtgctttaaccagcctgtttacgatgatcccgctgcttaatctgttcatcatgcccgttgccgtttgtggcgcgacggcgatgtgggtcgattgctatcgcgataaacacgcgatgtggcggtaacaatctaccggttattttgtaaaccgtttgtgtgaaacaggggtggcttatgccgccccttattccatcttgcatgtcattatttcccttctgtatatagatatgctaaatccttacttccgcatattctctgagcgggtatgctacctgttgtatcccaatttcatacagttaaggacaggccatgagtaagatttttgaagataacagcctgactatcggtcacacgccgctggttcgcctgaatcgcatcggtaacggacgcattctggcgaaggtggaatctcgtaaccccagcttcagcgttaagtgccgtatcggtgccaacatgatttgggatgccgaaaagcgcggcgtgctgaaaccaggcgttgaactggttgaaccgaccagcggtaataccgggattgcactggcctatgtagctgccgctcgcggttacaaactcaccctgaccatgccagaaaccatgagtattgaacgccgcaagctgctgaaagcgttaggtgcaaacctggtgctgacggaaggtgctaaaggcatgaaaggcgcaatccaaaaagcagaagaaattgtcgccagcaatccagagaaatacctgctgctgcaacaattcagcaatccggcaaaccctgaaattcacgaaaagaccaccggtccggagatatgggaagataccgacggtcaggttgatgtatttattgctggcgttgggactggcggtacgctgactggcgtcagccgctacattaaaggcaccaaaggcaagaccgatcttatctctgtcgccgttgagccaaccgattctccagttatcgcccaggcgctggcaggtgaagagattaaacctggcccgcataaaattcagggtattggcgctggttttatcccggctaacctcgatctcaagctggtcgataaagtcattggcatcaccaatgaagaagcgatttctaccgcgcgtcgtctgatggaagaagaaggtattcttgcaggtatctcttctggagcagctgttgccgcggcgttgaaactacaagaagatgaaagctttaccaacaagaatattgtggttattctaccaagtagcggtgagcgttatttaagcaccgcattgtttgccgatctcttcactgagaaagaattgcaacagtaatgccagcttgttaaaaatgcgtaaaaaagcacctttttaggtgcttttttgtggcctgcttcaaactttcgcccctcctggcattgattcagcctgtcggaactggtatttaaccagactaattattttgatgcgcgaaattaatcgttacaggaaaagccaaagctgaatcgattttatgatttggttcaattcttcctttagcggcataatgtttaatgacgtacgaaacgtcagcggtcaacacccgccagcaatggactgtattgcgctcttcgtgcgtcgcgtctgttaaaaactggcgctaacaatacaggctaaagtcgaaccgccaggctagactttagttccacaacactaaacctataagttggggaaatacaatgttccagcaagaagttaccattaccgctccgaacggtctgcacacccgccctgctgcccagtttgtaaaagaagctaagggcttcacttctgaaattactgtgacttccaacggcaaaagcgccagcgcgaaaagcctgtttaaactgcagactctgggcctgactcaaggtaccgttgtgactatctccgcagaaggcgaagacgagcagaaagcggttgaacatctggttaaactgatggcggaactcgagtaatttcccgggttcttttaaaaatcagtcacaagtaaggtagggttatgattagtggcattttagcatccccgggtatcgctttcggtaaagctctgcttctgaaagaagacgaaattgtcattgaccggaaaaaaatttctgccgaccaggttgatcaggaagttgaacgttttctgagcggtcgtgccaaggcaagtgcccagctggaaacgatcaaaacgaaagctggtgaaacgttcggtgaagaaaaagaagccatctttgaagggcatattatgctgctcgaagatgaggagctggagcaggaaatcatagccctgattaaagataagcacatgacagctgacgcagctgctcatgaagttatcgaaggtcaggcttctgccctggaagagctggatgatgaatacctgaaagaacgtgcggctgacgtacgtgatatcggtaagcgcctgctgcgcaacatcctgggcctgaagattatcgacctgagcgccattcaggatgaagtcattctggttgccgctgacctgacgccgtccgaaaccgcacagctgaacctgaagaaggtgctgggtttcatcaccgacgcgggtggccgtacttcccacacctctatcatggcgcgttctctggaactacctgctatcgtgggtaccggtagcgtcacctctcaggtgaaaaatgacgactatctgattctggatgccgtaaataatcaggtttacgtcaatccaaccaacgaagttattgataaaatgcgcgctgttcaggagcaagtggcttctgaaaaagcagagcttgctaaactgaaagatctgccagctattacgctggacggtcaccaggtagaagtatgcgctaacattggtacggttcgtgacgttgaaggtgcagagcgtaacggcgctgaaggcgttggtctgtatcgtactgagttcctgttcatggaccgcgacgcactgcccactgaagaagaacagtttgctgcttacaaagcagtggctgaagcgtgtggcagccaagcggttatcgttcgtaccatggacatcggcggcgacaaagagctgccatacatgaacttcccgaaagaagagaacccgttcctcggctggcgcgctatccgtatcgcgatggatcgtagagagatcctgcgcgatcagctccgcgctatcctgcgtgccagcgctttcggtaaattgcgcattatgttcccgatgatcatctctgttgaagaagtgcgtgcactgcgcaaagagatcgaaatctacaaacaggaactgcgcgacgaaggtaaagcgtttgacgagagtattgaaatcggcgtaatggtggaaacaccggctgccgcaacaattgcacgtcatttagccaaagaagttgatttctttagtatcggcaccaatgatttaacgcagtacactctggcagttgaccgtggtaatgatatgattagtcacctttaccagccaatgagtccgtccgtgctgaacttgatcaagcaagttattgatgcttctcatgctgaaggcaaatggactggcatgtgtggtgagcttgctggcgatgaacgtgctacacttctgttgctggggatgggtctggacgaattctctatgagcgccatttctatcccgcgcattaagaagattatccgtaacacgaacttcgaagatgcgaaggtgttagcagagcaggctcttgctcaaccgacaacggacgagttaatgacgctggttaacaagttcattgaagaaaaaacaatctgctaatccacgagatgcggcccaatttactgcttaggagaagatcatgggtttgttcgataaactgaaatctctggtttccgacgacaagaaggataccggaactattgagatcattgctccgctctctggcgagatcgtcaatatcgaagacgtgccggatgtcgtttttgcggaaaaaatcgttggtgatggtattgctatcaaaccaacgggtaacaaaatggtcgcgccagtagacggcaccattggtaaaatctttgaaaccaaccacgcattctctatcgaatctgatagcggcgttgaactgttcgtccacttcggtatcgacaccgttgaactgaaaggcgaaggcttcaagcgtattgctgaagaaggtcagcgcgtgaaagttggcgatactgtcattgaatttgatctgccgctgctggaagagaaagccaagtctaccctgactccggttgttatctccaacatggacgaaatcaaagaactgatcaaactgtccggtagcgtaaccgtgggtgaaaccccggttatccgcatcaagaagtaattcttgccgcagtgaaaaatggcgcccatcggcgccatttttttatgcttccgccagcggcggcaaaatcaattcatcgctctcatgctgctgggtgtagcgcatcacttccagtacgcgcaaccccgctcggtgcactgcatcggttaacgccttccctttcagcaagccactgatgagctgagcacaaaacaggtcgccagtccctttcaggtcggtttttacccgactatgggaaatgacattcacgctgtcggcagtgaccaccacaacctgcatctcctgattttcttcattaccggaggcgctggtaaccaccacccattttaatgtgtcactaagcagactttttgcggcagcaatggcactgtcgagatcgcggcaatttttaccggtcaggatttccaactcaaagatattgggggtaattccctgcgccagcggcagtaaatattgtcgatacgcttcgggaaggtcaggtttgacataaattccgctatcaatatcgtcaatcaccggatcgaccatgatcaataggtcaggatggtctttgcgtagcgcagtcagccactcggcaaggattttgatttggcttgccgttcccatatagcccgtggttacagcacgaagttggcgcagcgcatcacgctcctgaagcgcacgcaaatagccgctaaaccattcgtccggaatcgcaccaccgtagaaagtgtcataatgcggcgtattgctcagcaataccgtcggcacggcaaagacattcaggccgttctgtttgatagcaggcacggcaatgctgttgcccacgctgccgtaaaccacctggctctgcacggcgacgatatccgcctgcagtgccctactcttatcgttaaacaacaacaaactactcatttaattttttctccttgccgatgatcctcatcgtaatccaaccgaaactttacctgattctggcagtcaaatcggctatcacaaaacaaggataaggtaattcaatgaagaaaatcatttgtctggtcattacactactaatgacactccccgtttacgcgaagttaactgcccatgaagaagcccgcatcaacgccatgctggagggattagcacagaaaaaggatttgatatttgtgcgcaacggtgatgaacatacctgctatgaagcggtttctcatctgcgtctgaagctcggcaatacccgtaaccgcattgacactgccgagcagtttattgataaggttgctagcagcagtagcattactgggaagccgtatattgtgaagatccccggtaagagcgatgagaacgcacagccttttttacatgcgttaattgcgcagacggataaaacggtgcctgcggaaggaaattaatccgctttgggaaggcatttacaggaggtaacatgaaaaaacgctttatttatcacgatgaaaaaagcaataaattttggtggatagattacgaaggggatagtttagctgtcaactatggcaaggtaggtagtattggtaaattccagacaaaagagttcgataatgaagaacagtgtctgaaagaagccagtaaattgattgccgcaaaaatgaagaaaggctatcaagaagatccaaagtttaacttcatggatcgctactattttgatgatgaagaaattgggttacatgttaaaacgagtcacccaaacttccagtgccattttactgatccactttatatgtgttgctgggatgaagaatctccttttggcagcgatgaaggtgctgatgctctaaacgttcttgaaaatagcctccgtaaagagccggatctggactgtgctgatttccctcaaatgttaattgaaactatgtggggtatgaaatacatcgctatggacagtattcttgaagaggatgttcgtgcgcaattactagtcgatgaaatgagcactatccagagcaatatgattacctacgcaactgcattcggtcagattaaagtcatgggtaaaatctcccataaacttaaaaagatgggactcaatgcactagcgcgtcatcagcttaccgcaaaaattcttcaatggggtgacggtcaggacagtccaatacttcaaaaaatgattgatgaccttacggcgtttcctcacgaaaattaaatactgcatttgtcggcagcaacaactgttaaaaaagtgcgctttgtttatgccggatgcggcgtaaacgccttatccggcctacaaaatcgtgctaattcaatatattgcagaaaccttgtaggcctgataagcgtagcgcatcaggcagttttgcgtttgtcatcagtctccgatgctattaatccttaaatccccgccccctggctaaaatgctcttccccaaacaccccggtagaaaggtagcgatcgccacgatcgcagatgatcgccaccaccaccgcgtcagggttagcttttgccacccgcagtgctccggcaaccgcgccgccggagctgacgccacagaatattccttcccgcaccgccagttcgcgcatggtgttttccgcatcgcgctgatgaatatccagcacctcatccaccagagaagcgttgaaaatccccggcagatattccgtaggccagcggcgaatgccgggaatgctgctgccctcttccggttgcaggccgacaatggtcaccggtttggattgttcgcgcataaagcgactgacgccggtgatagtgccggtcgtccccatgctggagacaaaatgagtgatgcgcccgccggtttgctgccagatttccggcccagtggtggtgtaatgcgcataagggttatcgggattattgaactgatcgagcagctttccttcgccacgattcgccatctccagcgccagatcgcgcgcaccttccatgccctgctctttggtgacaagaatcagttccgcaccataagcacgcatcgccgcacggcgttcctggctcatgttgtcgggcatcagcaatttcatgcgatagcctttcagcgcggcaatcattgccagcgcaatgccggtgttaccactggtggcttcgattaagacatcacccggtttaatttccccgcgcttttccgcctcgacgatcatgctaagtgccgcacgatctttcacgctacctgccgggttattgccttccagttttaaccacacttcactgccgttatccggccccattcgctgcaacttcaccagaggcgtattgcctattgtttgttctaatgtactcacgatctctatccatacgtggtgttgcctgatgcgacgcttgcgcgtcttatcaggtctacaggttacaaaccttgccattaaaaagcccggatcgcgggaagcgcctccgggcgtttaacattcactcaacctatcaggcgctttgtgcgagagcaagttcctcatcgcgggtttcgatacgctcgtcgccgttatacagccgcgcatgttgcagaccaacgaataaacgctcgccacgctgcggggcatcgtcgccatgcatcacgaccgtcagcggttcgttgtaccaccccagcggctgcaccactaattgggtgtagtgacctttcgggctggcttccagtacctgtaccggcagcgggctatcgaggctggtacggcggctgatatccacttcccaagggcgcaggaagagatccaccggcccctgatacgcaggtgtgtagcccagcggccagcgatgcgcgccaacatggaactgcccgccgcgaatggttccctgcaggcggttcacttcgcccataaattcgagcacaaaacggatcgccggttcgcgccatacctgatccggcgcgtcagcctgttcaatattgccctggctcatcacaactacacgatcagctacttcggtcgcttcttcctgatcgtgggtcacaaaaacgctggtgaattttagttcttcatggagttgacgcagccagcgacgcagctctttacgcacctgcgcatccagcgcgccaaacggttcatcaagcagcagaatttgcggttccacagccagcgcgcgcgccagcgccacgcgctgtttctggccgccggaaagctgcgccggataacgatccgccagatgggcaagctggaccatttccagcaattttgtcactttcgctttgatggctgcggcattcgggcgctcgcgacgcggcagcaccgtcaggccaaaagcgatattgtcgaacaccgtcatatggcggaacagcgcgtaatgctggaacacgaaaccgactttacgatcacgtgcgtgcaggcggctcacgtcggtgccgtggaagcgaatatgcccgctggtttgatgctccagcccggcgataatgcgcagcagcgtggttttcccggaaccggacggccccagcaacgcgaccatctgaccactaggaatatccagactgatatcgttcagcacctgggtgcgaccaaagctcttcttaatattggcaatctcaatgctcatgatgttcctcctgctgtgcgcgtttttcctgattctccaggcgccactgcaacatactttttaaaaacagggtgataatcgccatcagcgttaacagcgccgcagcggtaaaggagccgacggtgttgtagtcctgctccagcaattcaatctgtaacggcaggctcagggtttcgccgcgaatgctgccggaaaccacgctcaccgcgccaaactcgccaattgcgcgggcgttggtcaacaccacgccataaagcagcgcccagcggatgttcggtaatgtgacgcgacggaacatctgccagccggacgcgccaagcaaaatcgccgcttcgtcttcctggctgccctggcttaacatcaccggcaccagttcgcgcaccacaaacggacacgtcacgaagatggtgaccagcaccattcccggccaggagaacataatttgcaggttatgctcgtcgagccaaccgccgagcgggccgttagagccgtagaacagcaaatacaccagaccggcaaccaccgggcttacggcaaacggaatgtccagtagcgtcagcagtaactggcgtccagggaagttaaagcgcgtcaccagccaggccagcagaatgccgaacaccaggtttaccggtacggcaatcagcgcgatcatcaccgtcagccagatggcgtgcagcatgtccggatcggccagattctgtaaaaccggcatcagccccttgctgaatgcctgcacgaagatgtaaatcatcggcaccagcaggatgaacgcgctaaccagcatcccgatgccaatcagaaaccatttgccccagttaatcgggcgcgcgtcataacgcttcaattgggtaacttccgccattaatgacctaccacacgccgaccaaagcgactttgcagagtgttaatactgaacagcagcagcagagatgccgcgaggatcacgctagcaatcgcgctcgctgccgggtaatcaaactcctgtaagcgcacaaaaatcatcaggctcgtcacttccgtcttccacgcgatatttccggcgataaaaatcaccgcgccaaattcaccaagactacgggtaaagctcagcgccacgcccgccaccagcgccggagaaagctccggcagcaccactttgcagaaactctgccagcgcgttgcaccaagcgtttccgccgcttcttcatattccgggcctaactcttccagcaccggctgcacggtacgcaccacaaacggaatgctggtaaaggccatagccaccgcaatccccagccatgtataggtgactttgatatcaaacttcgccagccattcaccgtaaaaaccgtttacggaaaagaggctggccagcgttaaaccggcgacagccgttggcagcgcaaagggtaaatccatcagcgcatcaagcagcgtgcggcctgggaagcgatagcgggttaggatccacgccatcagcagaccgaaaacgccgttaaaaatgcttgccacaaacgcgctcagcagcgttactttgtaggccgcgaccacctgcgggttggtgatcacctcccagtactgcgcccagctcatctgggccagttgcatcaccagcgcggagagcggcagcagcaaaatcaggcacacaaacagcagactggtgccgaggcttaaggtaaagcccggcagcacgcgtctggaggagacagcaaacatcagttacgccccgccgctaacagcttgtctaactcgccgccgctggtgaagtgggttttcatcacttccggccaggagccaaatttgtcttccacgcggaacagctcggtctgcgggaatttgtctttcagtttgtccatcacctccgggttattcacgcggtagtaatagtcggtgatgatggtttgcgcctgcgggctatagagccagttcagataggctttggcggctttttccgtaccgttggcctgcacgtttttatcaacccacgccaccgggaattccgccagaatgttggttttcggaatcaccacttcaaagccctgcgcttcatactgtttacggatgttgttcacttcgctttcgaagctaatcagcacatcgcccaggccgcgctcggcaaaagtggtggtcgcgccacgaccgccagtatcgaacacttcaacgtttttcaggaactgggtcataaactgttcggttttgcctttgtcaccaccgtcagctttatccgctgcgccccatgccgccagataggtataacgcgcgttaccgctcgttttcgggttcgggaaaatcagcttcacgtcggagcgcaccaggtcgttccaatcgtggatattcttcgggttacccttacgcaccaggaagcccatggtggagtagaacgggctgctattattcggcaggcggctctgccagtcggccgggatcagcttgcctttatcgtgcaggatttgtacgtcggtcacctggttataagtgacaacgtcggcttttaagccctgtaaaatcgccagcgcctgtttactactcccggcatgagattgttttatcgtcagtttgtcgccgccgttatcttttgcccattgttgctcaaacggcggattcagggcggcaaacagctcgcgggagacgtcataagaactgttcagcagttccgttgcctgtacatggcccgccagcagcagagaagcgaccagcgcgagactgttctttttcagtaagttaacggccattgcgcacccttataaatttaatgactttctaatagccatcatatttataacggacgtgaaaggagtaacggttttatataccgtttggtgatttggaagttgaaaagggaataagaacttggttcaacaggcgtaattgttgcagtcagtttggacacgaacagcgcggagaaaccggagcgtacacatagtacgtgaggatttcgagcactgcccggggccaaaatgacaaataaaatagcctggtgaacttagttcaagacgaaatcctccccacaaatgcagggaggaaacagaggtgaatcagataccgacgctaaccgtctccggcagtgtgctgccgccatcaatcacattctgtgtaccggttaaatagctggattcatcgcttgcgaggaaggccgccagttcgccgacttccagcggatcggcgaggcgacgcatcgggattgctttcgccatttcagtcagcacgctctctggatcttccgggttgctctggcgggcaatgctttccgccattggtgtgcgcacgtatcccgggcaaatggcgttaacgcgaataccagactgcgcgtactccaccgccaggctttttgtcaggccaacaatcgccgctttcgttaaggcgtacgccgtttcgccaggatcggccaccatatcaccagtgacactagacatcatcacaatgcgaccatctttgcgggcaatcatctccggcagcaccgccttcgtgacgttccatacgcctttaatattgatgtcaatatggaaatcgcgatcgtcatcgctcatatcgaggaaactgcccagacgacaaacgcctgcgttattcaccaggatatcaatgcgcccttctttttccttcgcgcgtttgatagctgcggctacgctcgccgggtcacgcacatcggcgacaaccgccgtacagcgatgaccacgaccacacagttcgtccgccagcttttcgatctcaggggagatatccagcaagattaggttcgcgccatgacgtgcaaaagttctggcaattccttcgccaattccctgcaatgcgcccgtaatcagtgctgtcttgcccgtgagtttacccattttaatgctctccttgttaatacagagcgttacactccattccctctgaaaatacaggataaacaaaatattgctgcggatcagctcactaattcaggaaaatctcaatccagtcgctgctttatgcatcatttcaggcgttgtgttagctcactgctgcgctgaatcattttcaaactctccacatcattgagttgcacaaggccaacaaacagtaaatcggtaacagaattttgcgccgtgcgggtagacatgctgctgctacgccattcggtttctccggaaacggtatcgagggtgaaatgcgccagccgccgcagcggagagtcagtcagagaagtaatggcaatcaccgttgccccctgctttcgtgccgcttctgcgcacaagacaatctcttttttactgccgctgtaagagatagcgatttgtacatcgccttttttcaacgcctgagaaacggtggcttgtacgtgcgtgtcggcttcgcaggccacgcgatagccaattttcatcagtttgaagctcagatcgcgccccaccagcgcgcttccgcccaggcccgttatctggataaacggtgctttactgatgacctcaatgattttttgcagccgcgcgtaatcgagcaacgcgcaggtttgctccagcgccagctctttttcgcgattcagtttgcgcgcgatcacttccaggctatcatcactggtaatgctactgtgcaggtgcagtgccgtggcattcgttttctcccggctggcactgtattcgcctattaacgccatacgcaattcagtaaatccttgcgcgccgagtttttgggcaaatttcactatgctgctctggctaatgccgagctgtttcgccatctgccgactagaaacggattgcagctcactcacgttggcctgcagaaagtcagcgattttttgctcgttttcggtgaattcactccccgcattgcttattttcgtcaggtacaacatcttccactctcctgggctggcagcataaattccgcttaagttcttatgacgctcttcacactctgcgagtgtagactcaatgattcctttaagcctgtcaattcgggatatatgattccatacatctgcaattatttgatcgtaaatagtaaggtcaccaccgatgcaatttgaaaagatgattactgaaggcagcaacaccgccagcgctgaaattgaccgcgtaagcacgctggaaatgtgccggattatcaacgatgaagataaaaccgtaccgcttgccgttgagcgcgtactgccggatatcgccgcggcgatcgatgttatccacgcccaggtaagcggcggcgggcgtctgatttacctcggtgcgggaacatccggtcgtctggggattctggatgccagcgaatgtccgcccacctacggcgtgaaaccgggtctggtggttggtttgattgctggcggcgaatatgccattcagcacgcggtggaaggcgcggaagatagccgggaaggcggtgttaatgatctgaaaaatattaatttaacggcacaggatgtggtggttggcattgctgccagcggtcgcacgccgtatgtgattgccggactggaatacgcacgccagctcggctgccgcacagtgggaatttcctgtaatccggggagcgccgttagtaccaccgctgagtttgccattacaccgattgtaggtgccgaagttgttaccggttctagccggatgaaagcaggtacagcgcagaaactggtgctcaatatgctttccaccgggctgatgattaaatccggcaaagtgttcggcaacctgatggtcgatgtggtcgccaccaacgaaaaactgcatgtgcgacaggtcaatattgttaaaaacgccaccggatgtagcgcagagcaagcggaagcggcgttaattgcttgcgagcgcaactgtaaaacggccattgtgatggtgctgaaaaatctcgatgccgcagaagctaaaaaacgcctggatcaacacggcggctttattcgtcaggttttagacaaggaataacccatggccaaagagatcagcagtgaacttctgaacaccattcttacccgtgtcggcggaccgggaaatatcgccagttgtggtaactgtatgacgcgcctgcgtctgggtgtacatgacagtagtctggttgatcccaatatcaaaacgctggaaggcgtgaagggcgtcattttgaccagcgaccaggtgcaggtcgtttttgggcctggtaaagcgcatcgtgccgcaaaagcgatgagcgagctgctgggagaagcaccggtacaggatgccgcagaaatcgccgcccagaacaaacgtcagttaaaagccaaacaaacctccggcgtgcaacaatttctcgccaaattcgccaccatcttcacgccgctgatccccggttttattgccgccggtctgctgctggggatagcgacgttaattgccacggtgatgcacgttccggcagatgctcagggaacactacccgatgcgctgaattttatgaaggtgttcagcaaaggtttgttcactttcctggtgattctggtgggctataacgccgcccaggcatttggcggcacgggcgtaaatggcgcaattatcgccgcgctctttttgctcggttataaccccgcagcgaccaccggttactacgccggttttcacgatttctttggtctgcccatcgatccgcgcggcaatattatcggcgtgctgattgccgcgtgggcctgcgcccgcattgaaggcatggtgcgccgctttatgccggacgatctcgacatgctgctgaccagcttaatcaccctgctgatcaccgctacgcttgcgtacctgatcattatgccgctgggtggctggttattcgaaggtatgagttggctgtttatgcacctgaacagtaatccgttcggttgtgcggttttagccgggctgttcctgatcgccgtggtatttggcgtgcatcagggctttattcctgtttacctcgcgttaatggacagccagggattcaacagcttatttcccatccttagtatggcaggcgcgggccaggtgggcgcggcgctggcactctactggcgggcgcaaccgcacagtgcgctacgcagtcaggtacgcggggcgattattcccggcctgctgggcgttggtgaaccgctgatttacggtgtcaccctgccccgcatgaagccgtttgttaccgcctgtttaggcggcgcggcgggcggtttgtttatcggcctgatagcctggtggggtctgccgatgggcttaaacagcgcctttgggccgtctggtctggtagcgctgccgctgatgacttccgcacaaggcatccttccggccatggcggtttatgctggcgggattctggtggcatgggtttgcgggtttattttcaccacgctctttggctgccgtaacgtcaatctggactgatatcatgaaacggacaatgctctatctttctctgctggctgttagttgtagcgtcagcgccgcaaaataccctgttctgacagaaagcagcccagagaaagcagggtttaacgtcgaacggcttaaccagatggatcgctggattagccagcaagttgatgtcggttatcccagcgtaaacctgctgatcattaaagataatcagattgtgtatcgcaaagcctggggagcggcgaaaaagtacgatggcagcgtgttgatggaacagcctgtcaaagccaccaccgggacgctgtatgacctggccagtaacaccaaaatgtacgccacgaacttcgccctgcaaaagctgatgagcgaaggcaaactgcatcctgacgatcggattgcgaaatatattccggggtttgccgatagtccaaatgacaccattaaaggcaaaaacaccctgcggatttctgacctgctgcatcacagcggcggtttcccggcagatccgcaatacccgaataaagcggtcgcgggcgcgttatattcccaggataaaggccagacgctggagatgatcaagcgcacgccgctggaatatcagcccggcagcaaacatatctacagcgatgtcgattatatgctgcttggatttatcgtcgagagcgttaccggtcagccgcttgaccgctatgttgaagagagcatttatcgcccgctcggcctgacacatacggtatttaacccgctgctgaaaggctttaaaccgcaacaaattgccgccacggaattgaacggcaatacccgcgatggcgtgatccatttcccgaatatccgcacctccactctctggggtcaggtgcacgatgaaaaagccttttatagcatgggcggcgtttccgggcacgcaggtttgttttccaataccggcgatattgcggtgttaatgcaaacgatgctgaacggcgggggctatggtgatgtgcagctgttcaatgcggaaacggtgaagatgttcaccaccagctctaaggaagatgccacttttggcctcggctggcgcgtgaatggtaatgccaccatgacgccgacgtttggcacgctggcaagcccgcaaacctacggtcacactggctggaccggaacggtgaccgttatcgatccggtgaatcatatgacgattgtgatgttaagcaacaagccacatagcccggttgccgatccgcaaaagaatcccaatatgttcgaaagcggtcagttgccgattgcaacttatggttgggtagttgatcaggtgtatgcggcgttaaagcagaagtaataaaaaggccagtcagtaatgttactggctggtctgagagtgctgacaaacgcaaaactgcctgatgcgctacgcttatcaggcctacgtggagcccacaatatattgaattagcacgatttcgtaggccggataaggcgttcacgccgcatccggcgtgtacaacgcgcacttggtcaacaatctgaggccagtcagtaatgttactgcctggcctttaatcaatgaatcagaaacgcttacagcgccatcaacttgtccaggctcggtgcgaaataatagccgccggttaccggtttggtgaaacgcaacatcgcatcacgcttaccatcggtatcgccaaacatgctcagcagttgctgctcaatgttatgcagacgcgcgcagtaggcgcagaagtacagaccgtgagtgccactggcagtgccgtacggcaggctctggcgaacaatcttcagccctttgccatcttctttcagatcaacgcgggtgaggtgagaggtttccggacgttcgtcgccgtcgatctcttcgttggcctctttggtgcgcccgatcaccatctcctgatcgtgaacgctcatccggttgagctgcttcaggttgtgttcccaacgctggacaaacacatagctgccgcccgcatccacgccgtctttgataaccgccacttcgcgacgcgtctcttcacccgccgggttttccgtaccgtcaacaaagccgctcaggtcacgctcttcaacccaacggaagccgtggatctcttctttcacttcaatgcagtcaccaaaggcttccatcgccgcctgggcgacagagaagtttacgtcgtgacgcagagaaagaatgtggatcaacacatcgaactgggtcgtcggcgcaaggcctttaccgtagcccggaaaatctttcagctcttctgccccaacgccgccgctcagagcgcgccaggtgttgttaccaaaggcaaccaccgcaccaagatgcgcgtccgggaatttcgcttcaaaagttgccagtttgtcggcaaatgttttactggccgcacgcagggcgtcaacttcccctttcacgttggcttcgatccaaatcgccgcgcggcaatgttctggcaaaatgccactctgaacctgagacattgttcctcctgaaaataataatgccacgcaatccgtggcattgttgagcgctattttacgtgttttttcgcggcggcggtttgttcagacgcaaattaacgccgccagataattttactgactttccagtttttcagggtatcgtcgctaggcattaacccttcaggaccacgccattccccgctgaactggtagctaatatgttgactgccttcggctttacattcgacggcacgattatcatcaccatcagctttttggcaattgccaaatgctttgctgtaaaggtcgctaaacggtgtaccgattttaacaccggtgtcagcaggaatatcgctatccagcacgtcaatgcgactgatcgtgccttgatcgccgttaatcaccatcgccacgttgtcgcccttcatcacttcaaaaaagcgcaccacgttgccgttcgcggttttcattccgctgcgcaggcgataatcgccatcaagcgcatcggcaatggcttgttcttgcagtggtgtggacgccgttaattcacccacgccctgctcgctcactttggtggagctcccaaaccagttccacgggttagcggcagaccagttaacactgctcatcgtggaacagccggtcagcatcaatggcatagcgcataacattaaacgcaggcttttcatgtcacttcctttggttattcaataacgttgcttggagtgcaaattcaccaaaaagtgccgttattcttttacttcataaaaacaagcgcgtaaacgtcgattggtcagcagccagattaacgccacaatatccgccactaccagcgccagaccgataccgctaacggattcaccgttcagccacagccacggttgccagcaaagtaaaaccacctgcgccaacagcaacagaaaatagagtacacgccaggtgcgaggaaacgtagcccgccgaccgctcaacaaaaacgccagcaccgccggaatgccaggaatcagccccagccagaaattatcgtgatcgggataaaacagatttagcagcgcagtaccctgctcgcggctcgcaccggcaatgacaaacagcacccaggttcgcgcctgaagcaatagcacaagccagaagagcaagggtaaacgcaggcgaccgtgcgcatcataatggacaggatgaaactcagtactcttcatcttcaatcaaacgcttacccagactcagcacgtcggcgtgttcatatcccaggcgttcatacattccgagcaccatgtcgttatcttccggcacattgatctgaattttcgggcagccacgagcaatcagctttttctccagccgattaagcaacgcattggcaatcccacgcccacgaaactctggatgcacgccaagataataagcagacccgcgatgcccgtcataaccgcccatcaccgttccgaccacgtcaccgtttacctcagcgaccaaaaacaaactgacgtcatggttcatcttacgctcgatgtccatttccggatcgttccacggacgcagcaagtcgcaacgctcccaaagggtgatgacctcttcgaaatcttcctggcgaaatacgcgtatctccatggtattcgttacctttttgcgggttaaaaggctgattatggcgtgaacggtcgaattagccaatatctgacgaaaatcggttgaaaaagtggcataatggggagttgtcaactattgaaatgaaaagtaaaacaattctcaacagcaaaccgtcgtaacggattacgcgatacgatataacatctggaactttattattacaactcaggccgtatgagcacttttaaaccactaaaaacactcactagccgccgccaggtgctgaaagccggtttggctgccctgacgttgagtggaatgagccaagccatcgccaaagacgaacttttaaaaaccagcaacggacacagcaagccgaaagccaaaaaatctggcggcaaacgtgtcgttgttctcgatccaggtcacggcggaattgataccggagcgatcggacgcaacggtagcaaagaaaaacatgtggtgctggcgattgctaaaaacgtccgttccattttgcgtaatcatgggattgatgcgcgtttaacgcgttctggcgatacgtttatcccactttacgatcgcgttgaaatcgcccataaacatggcgcagatctgtttatgagtattcatgccgatggctttaccaacccgaaagctgccggtgctagcgtatttgccctctctaaccgtggggcaagtagcgcaatggcgaaatacctgtctgaacgcgaaaaccgcgccgatgaagttgccggtaaaaaggcgactgacaaggatcacctattgcaacaagtgctgtttgatctggtgcaaacagataccattaaaaatagtctgacgctcggcagccatattctgaagaagattaagccggtgcataaactgcacagccgcaacaccgaacaagcggcatttgtggtgttgaaaagtccgagcgttcctagcgtgctggtggaaaccagctttatcaccaacccggaagaagaacggctgttaggcacggcggcgtttcgtcagaaaatcgccacagcgattgctgaaggcgtgatcagttatttccactggttcgacaaccagaaagcacatagcaaaaagcgataagttatgaaacccgacgcacaccaggttaaacagtttctgctcaaccttcaggatacgatttgtcagcagctgaccgccgtcgatggcgcagaatttgtcgaagatagttggcagcgcgaagctggcggcggcgggcgtagtcgggtgttgcgtaatggtggtgttttcgaacaggcaggcgtcaactttagccatgtccacggtgaggcgatgcctgcttccgccaccgctcatcgcccggaacttgccgggcgcagtttcgaggcgatgggcgttagtctggtagtgcatccgcataacccgtatgttcccaccagccacgcgaatgtgcggttttttattgccgaaaaaccgggtgccgatcccgtctggtggtttggcggtggcttcgacttaaccccattctatggttttgaagaagatgctattcactggcatcgcaccgcccgtgacctgtgcctgccatttggcgaagacgtttatccccgttacaaaaagtggtgcgacgaatacttctacctcaaacatcgcaacgaacagcgcggtattggcgggctgttctttgatgacctgaacacgccagatttcgaccgctgttttgcctttatgcaggcggtaggcaaaggctacaccgacgcttatttaccaattgtcgagcgacggaaagcgatggcctacggcgagcgcgagcgcaatttccagttatatcgtcgcggtcgttatgtcgagttcaatctggtctgggatcgcggcacgctgtttggcctgcaaactggcgggcgcaccgagtctatcctgatgagtatgccgccactggtacgctgggaatatgattatcagccaaaagatggcagcccagaagcggcgttaagtgagtttattaaggtcagggattgggtgtaactccctcacccccactcccgcatccgctgatgcagcgtcagactcggcttctcggaaaacagctgctggtaatccgtggcaaattgccccagatgccagaatccccactgcatggcggcgtcttttaccgtcatactttggctccacggacttatcagttcgcggcgtacggcgttcaggcgaatgcgtttcagccacgcgttcgggccaatgcctaaaatagcgtgaaacgcgttttgtagcgtgcggcggctgacatgcagttgattacacaaatccagcaccgtcaccggttcggacatgttttccagcacatattcacgggcgcgggaaagcaatcgacggtaactctgatgactgatgctttccgccgtcaccattggttgcgcttcttccagcatggcccccatcgccattagcaaattatcccccagcacttttcgcactgcaggctgatggagattttccggattctcgcaaaacgtcgccagcgcctgttggacaaagccccacagcgcggctttatgctgctctttcacttccagcgcgctctggttacgcaacatatgtaatacccgatccgggttatgcaaaaagttagcctgccgggtgatgacatcttcagaaagcaccacgcccaggatcgtgtaatcatccggcgtgctcagttcaaattcagtgccaccagggcgggtggcgatttccgcgcttcccagacattggctaccgataaatccctgctcaccgcgcgtcgccggaatgccaaaccagaagctgttcggccagaccaggcagctctgacgcagcgccagaccggtgtattcacgaaaaacctgaatatcatcgagtagaatttccgtaaattcaccatgaaacttgcccggatgcagctgatcgtaaatctgctgccaggcggtaatcgttaaagcatgttcatagacatccgttgtctgtcgttgatgaacattatccacttcgaccttcggcgtgagcttcaggttttcgggtaagggttcatgataaagatggtgcaaattggctgtacgggtctttttcatgatgttaatgccgggtgttgtaggacacccggcacctccgacaggttaatggggcttgagacgataacgactactgcgtttacgtaacgtcccggcagaaaagagctgttcgagcgcatttctggctttttccagcggccagccaaagtgggcagccacttctcctgccgtcattccctgacgtacacttgttaacagcgccaacaactcgtcagcagattccgcgacgataactggcgcgtcgggttcccttacgggttgcttcggctggcggttaaagccagtaaccagccactgggtgtcatcgtctggccgaccgatctccttgcggctgatgacacgcccggtacgcatcgcggcagcacaacctgcgtccagcgccgcacgacacgccgccagatcgccttccaccaccagcgttaagcgaccagggtcaagcacttcgtgactgagcagacgaacgttagctgctttgagcatggcatccgctgcatctatcgcggcgaccatgccgtccacttccagcaatcccagtgcattgatcatcggcaacctccgttacgcacgctggattggattacgcgcgatttccagcactgcatcggtaaaggcgttacaggctgctttacacgctgcctggctaccggttaaaaatgctgcgctgtagttggtttcagacggtggcgggacataggtcgccagctgtacgtcggcagacttcagggctgcatcaatgccataggtcgcttccagcggcggtgccaccagatacgccatcggatcgccaagcgtgatcccggcggtactactgagataagaaccggtacggctaactacatgtgccaggaatgccgtatcttgcgcgtcattagcccactggaaagctgcgccattttcaatatgcgcaatcatcgcatccagacctgcacgcacttccgccgggtttggcccaccaagcataatcagcacttcaccggcagtcggactcgggccgtgtgcagcgcccgcatataggctgcggccatacaccacttccaccatcgcctgcttggtcgcttcatcagcggcaatgtaggtgacgtcatcggagtcggcagaaatcagaccgaggctacgaatatgcggcggcaatttcagttcacgcgcaaaatcggcgttaacggaggcaatcacccgcatagcggtgacagacggtcgaatcaaatctaaagctggcatgatgcctccttatcgggtcatgttgatgccggatgctttctgctccagcatacgtttcgccaaatccacaatgacggctgcggcttcaaccggcggcgtgccgccctggtgaatgttagagatacaggtgcgatcggcctcaacggtggtcgccatacgcgggctgtaaacggcgtagcaggagaggctttcactctgacccaaccccggacgttcgcccaccagcaggatcactactttcgcgccgaggatctcaccgatctgatcttcaatcttcacgcgaccataacgaacaaagaatggtgtaccgactttcagcccggcctgtttcaggcccgccatcagcggtggcaggatctcttcgtagttcacggtgatcgcatcagtactcaggccatcagaaataacgacctgtacgtccggattggcaacacactgcgctttcagcgcttcaacagcttctgcacacaggcggcggcccatatccgggcgagtcaggtagagatttttgtcgctaatttcagagcgtacttccagcaagccctgcgctttcacccactcttccggcacttctttcagtacggtatctttgctacgagagtgatcggccaggaaacgcagcagcgcctgcgtacgtggacgcggaccggcacgaccggtacaaacgcgggccacggtgctgcggcgcagttctgttaatacgtctgcgcgatgcggattttcaacaccaatccacgcttttgcttcagcggaacctaaatccagcgcacagctttcgctggtcaccggtgccgcacagttggtggtggcgcactttgcttcactcggcgcgggggccgcttgtcccatactcgccatcacgctgcgtacaatttcttcaatctgtttttgatccatgatatgttatctccgcgtcatcagaagaacagactcggatcgcccgcccgtttggtcaggcgaccgtttgccataatgcccatgctttccagccagcgttcaaactccggactcgggcgcaggttgagtaactgacgcacagtggcggtatcgtggaatgcggtggtctggtagttgagcatgatgtcatcacccagcggcatccccatgatgtagttgcagcctgcggtggcgagcaggatcatcaggttttcgttgaggttctggtcagcgtcagcgtggttggtataacagcagtcacagcccatagagatgccgctcagcttgcccataaagtgatcttctaagccagcacggataatctggcggtcgttgtagagatactccggcccaataaagccgaccacggtgttgacgataaacggatcgtaatgacgcgccagcccgtagttacgtgcttccatcgttacctggtctgcgccgaagttagcgccagcggatagcgcagagccttgtccggtttcgaagtagaggcagttttccccggcgatacggttgaactccgcgcccactgcgcgcgcttcgtcgagcatcgccagctccacgccaaactctttcagccctttttcgctgccacagatactctggaaaatcagcccgcccggtgcgccacgacggatcgcttcgatctgggtggtgacgtgcgccagtacacagccctgagttgggatgttgaatttgtcgatcacgccatagatggtatccaacacgcggcttaagttttccacgtcgtcagtcaccgggttaacgccgatcaccgcatcgcccaccccgaaggaaagcccttcgtagatttgcgcggcgatactttgcacgtcgtcacgggtgtcatttggctgcaaacgggcgctaaaggtgcccggaataccgatggtggtattggcctttttgattaccggcattttcttcgcgccgtagatcaggtccgcgttggagcaaatcttcgctaccgccgcgaccacttcgctggtcagccctttgcgggtaaaggcaatgtcgtccacgctggtttcatcgctcagcacatactcacgcagttcgctgatgctccagtttttaatctggttgtaggccgtttcgttaacatcgtcctgaatcagccgcgtcacgcagtcatcttcataggcaatcaccggattattgcggatgtccgctacggtcatttcgctcaacacctgctttgccgccacgcgctcctgactgcttgccgctgcgacgcccgccagcacatccccgctacgcagttcgttggctttagccagcacctcttttacatccttaaactgatatacattgccgaacaatgtggtctttagtttcataagtcgttccctcaggaaggaaatgcgagacttttcaccgtcaccggcacaacgcttccgccaaaaagaggcgtaccaatgtcgatatagtcccccgcgcggacaatcacttcgtcaatgactgccaacgggagttgttgtagctgtgggcgcaacaacatgcccagagctttaccaaagtcctgcccggccaccaccagcaggggatgcggattcggaaaacgcgcgacgaaatcgaccaacgcgttgatgaccgtcagtaccgcggcgtaacgcacaggcaggctggcgggaagcgccagcacgtacgcgtcagttttgggatcaagatccagctgaatcagcgcctgttgccaggcccccaccagatccgtttcatcaatcgggatcgccaccggcaaattgcgcagcggcagttgtacgccctcaagccagattgtgctgccagagaggctaagggtatgcgcgcccgcgccaatcaccgtggcgcgcacggtttgcgccggaaactgtacgttcatctcacgcaggcgcggatggtcatgcagcgcagttgccagcagcgggccaatatcggcaaaacagaacgggtcggcgggctggtggcgataacattcgcccacgccgccagaaagcgtaatgatttcgggcgtaacacctgcgggcagcaaaccggtttgcatcaatgcctgcgcgagcggactgagcgttccgtcaatcacttcgacaatcagttctgccatccgccgggtcacctgcaccagctgcgcgccggtcaggctacgggcgtcggtgcctgcaccgaagcactcatccacaatcatctgccccggtttatgagcgtaaaccacgcgcccgtggctgtcggtttccagcaggcgaccaccgacgttgaggcaggcagtgccgctgatttttccggcatcgaacagggcgtagttcgcggtgccaccgccgatgtcgatattcagtacccgacacagccgttgttcagaaagggtttgtgccccggctccgtgaccggcgatcacggattcgaggtgcggcccggcgctggcaacgacaaaatcgcccaggctctgagagagcgccatcaccgccgggcgagcattgcgggttttcgcgctttcaccggtgatgatgatggcaccagaatcaacgctttccggctcaatacccgcagcatgatattgctcgagtattaaggttttcagttccgcttcttttaaaccgccctgtttatcgacaggggtaaagaacaccggactttgccagctaatttcgcgtttaatgaattcgtagcgcggcacctggctcaccgccgcacggttaaccagctccagccgggagaaaatcacctgggtggtggtggtgccgatatcgataccgacgctcaatagctggcgagtgttcacgattgtgcctccgcttcggtttaagtcagctttgtgcctccgcttcggttttagtcgcggtcgcgtcttcttttggcaccagcatcatcgccacgccaatcgccgttacgccgccgatcaacttgccgacaatcatcgggaagatcatggcgttcatgttggcagcggcgaagcctaagtggtcgcccagggcgaaagcagcggaaacggcgaaggcgcagttgatgactttgccgcgggtatccatctgcttcatcatgccgaacatcgggatgttgttggcaagcgttgccaccatgccggctgccgcgatgttgttcatattcagtactttaccgacgctcatcagcggtttttcaaaccagcgagtcagcagcagcaccatcggatacgcccctaacagaacgcaggagatagaaccgataacttcaatggcgcgcatcacctcaccgggtttatcgccaggggccataaagataggatccagaccggggatcagttcccagccaagcaggaatttcactaccgcagcggcaagaccgagggtgatcaatgcaacgaggaatttggcgaagatctggaagccgttgatcattttttccgggatgaatttcagccccagcgccaccagaatcgcaacaatgatcaccgggatcatgttcatcaggatcagggcgaaagtgaattccaccggctggccgttgatctgcacaccggagtacatagcaaccagaccaccagcgatacaaccaatcggaatggtcacaatgcccgccagcacgccgagcgccagataacgacggtcagaaggttcgataatgccgagcgccaccggaatggaaaacacaatcgttggccccatcatgctcccgagaattaacccagagtatagccacgcggctacgtcgccgcccgccagctctttggcgaggaagaagccgcccatatcgcacgccagcagtgttccggcgaacatgcttgggttagcgccgagcatttcgtaaaccggaataattaccggcccgagaacgtgagccagtaccggtgccagcgcggtcataccgaccatcgccaggcccagtgcgcccattgccataaagccttcttcgaactgaccgccacttccttcgatacttttaccgaacttaccgaggaaacgagcagaaccgccgaactggctcaggatcctgtctacggcagctatcagcataaagaacatcatgatgtacatgatgatttcgttaattcccatcgcctttactccctgttagttgttatttattggcggatgcggcgtaaacgccttatccgccctacatgtgcaatcccgtaggctggataagacgcggcaagcgtcgcatccggcaattgcaccgcgccactggcggatgcggcgtgaacgccttatccgccctacatgtgcaatcccgtaggctggataagatgcggcaagcgtcgcatccggcatttattgcgccgctgcgtacaggccgacaatctgctccaggctggcggtacgcgggttactgcgcagacaaatatcttccagcgcggcctgcgcccatgcgccgtaatgcgcagatgtcgcaccaacatcgcccagtcgtttaccaatcccaacttccgcaatcagctcacttaccgcgttaatagcgtcacgatcgtcggattttttagttcgcagtgcccgaccaatctgactaaagcgttcacgacaaaccatccggttaaattccatcaccgttggcagcaacatggcgttcgcgagaccgtgcggaatatgcagcgccgcgcccggctgatgcgccatcgcgtggcacaacccaagacccgcactggaaaacgccattcccgccatacaactagccagcaacatgctctcgcgcgcggcaaggtcgtgaccgtagcccaccgctttcggcaggcttttgccaatcatcgcaatggcaccaatcgccagactgtcggtaaacggtgtagcgttcagggcgctgtatgcttcaatggcatgggttaacgcatcaatgccggtcatcgccgtgacatggctcggcacaccttcggtcaatgcggcgtcgaggatcgccacatccggcatcaggctggcatgggctaacacctgcttgcgcccgctcaccgcgtcgataatcaccgttacattggtggtttcagagccggttccggcggtagttggaatggcaatcagcggcaagcgcggttgcagaacgctggtttcactcatctctgccagcgtgctatccgggttcgtcaccagcaacgtcacggctttcgccgcatccagcacgctgccgccgccaaacgcgatcaccccatcacagccactctcacgcaactgcgccacggctgcacacacgtcggtaatgcacggttcgcccaccggacatggccagagcgtcatggcgatacctttaacggtcaggctacgcgtcagcccggcggtcatccctgcctgatgcaaaaagctgtctgccatcacgaacagatgtttcagcccacgcgtttgcgcttgctgtccgcaactgctcacgctgcccggaccgcaaagcgtcaccggtggaacgctaaatgtttttacccgttgcagattcagggtatcgaacgcctgaaagagcgcggtctgcaattcattttgcatatagcccctccgctttctctcgcccactactggcgatcgccagcggggtcataaacaaactgtgctgcggtaaatgcacctgtaacgccgggaattgtttgcgaaacagttccgccacgcccggttgcatacaagagccgcccgccagccataaatcagtaatgccctgcccttcaatatgccgggcgacaatgtccgccattttttcgtacaccggtttcaccgcaggccaaatctcttcaccgtgaccgcgcttgtactgctccgcctcttccaggctaatacggcgatttccggcgagagtcagagagatgtgatgtccgccggtggcttcatccgcgctgtacgtcaccttgccctttttcacgatggcaatgccggtagtgccgccgccgatatccactacaccggcgttgtccagttgcagcagatccgcaactgcggttggctcatccagcacatggctcacttccagtccggcagattccagcacgttgatggaaatacgcgggtccgtacctggaggaaaactagtcgccgcatggctaaaacgacgaccgaattgctgctcgagcgtgtcgagatggcgacgaacaatggtgacagcgccgaagaaatcccagacgatgccgtcgcgaaccacatcggcccagtcgaggcataccgccactggctgaccgtcgcggtcgacaaccatgctcaccacatcgcaggtgcccagatccacccccagccacagcggagattccgtcgcggcgggcgtctggttacacagcgttgccgccgtttgcagacgtggggtgagccattgttcgtcgtgcgccatctgttactccttaaacaatgcgaaacgcatcgactaatacacagcgacgcagacggacaaacgtacgcgcgctggttaccccttcaccggttggcgtggtgatggtcatggtggtccagccttccccgcccagccccagcccggcaatgcacggtccgttcttaacgaaaatgctggtatcaatagcattcgccatctggttcatgttttcgatgttgcggctgtgcattgccgccgtgtggtggcaaccgccttccagtttcaccgctagcgcaatggcatccgccacgttggcgacgcgcacgacgggcaacaccggcatcatcagttcagtcacggcaaacggatgttctgcggtggtttccacaaacagcaggcgcgtttcttgcggaactttaaggccgattgccgccgcgattttgcctgcgtcgcgaccaacccagtcacggctgacggtgccttttccgcgctcgtcgatatttttcagcaacaccggttgcagctgctgcgcctgttctgcggtcagtttcaccgcgtgctggccttccatcagacgcatcagttcatcggctacgctatcaacaacaatcagtaccttttcgtcggcacaaatgatgttgttatcgaaagaagcgcctttgacgatggactgagcggcacgggcgaggtcggcggtttcatccaccactaccggcgggttgccagcgcctgcggcaatcagacgtttattggtgtgtttacgcgccgcttctactaccgcttcgccgccggttaccaccagcaggccgatacccggaaacttgaacaagcgttgcgcggtttcgatatccggatttgccacagtaaccagtaagttttccggcccacctgcggcaacaatcgcctggttgagcagcgtaatcgcccgctgggagacttttttcgccgccggatgcggggcaaaaatgacgctgttgcccgcggcaatcaggctgatggcgttgttaattacggttgccgccgggttagtggaaggcgtcacgctagccaccacgccccagggtgcgttttcaattagggtcaggccgttgtcgccagtcagcacttgcggagagaggcactcaacgcctggtgtgccgcgcgcctgagcgacgttttttgcaaatttatcttcaacgcgccccatgccggtttcactgacggcaagttccgctaaatctctggcgtgtttttcgcctgcttcacgaatggcagcaatggctaactggcgcattgccacgctttttaacccttgctgggcgactttggctgccgcaacggcgtcatccagggacgcgaaaacgcccatctcatgaacggcggcggacggcgtgtcactgctttgcattttcagcagtaccgctttcaccacctgttcaatatcctgttgattcatgatgttctgccttatttgtggaaaattacctgaccgccagacaccacctcatcgacaatgccaatcacgcacagatcgaccggactcgtttcgcttttatgcgcctggcgggcggaactgccactcaccagtaacacccactccccggttcccgcgccaatattgtcgatggcgacggcgcattgcccgtcaggattaccttgtggatcaatcatttccaccatcagcaatttgtcatgcgccagtccgtgatggcgtacggtacaaacaatttgtccagtgacgactgccagtttcatacccgcctccgtggcgtatttcaggtaaaagctccccctaccctccgcagaaggtaaaatgaaaaaggagagagcgtgacgcccgaatcgacgtcacacagggtgattacaggttgctgctatcgcctttcaggccgatcgggaagacttcttccaggtcgccgtgcggacgcgggataacgtgtacagataccagctcgccgatacgctgtgccgctgcggcacctgcatcggtcgcggctttacaggctgcaacatcaccacgaaccatggcagtacacaggccgccgccaatctgcttaacaccaaccagcttgacgcgcgcagctttcaccatcgcgtcagaagcctcaatcagtgcaaccaggccccgggtttcgatcattcctaatgcttccattgtgctttcctctttatcagggtccagaacgggaccgttcattcaaccagtgtttgtaaactgctttcgcggttcacttctgtctgacgcggcacagctgccaccagcgccagctcgataatttcctgcacgctacaaccacgagagagatcgtgcatcggcgcggcaagtccttgtatcagtggcccgacggcacgatatccgccgagtcgttgtgcgattttgtaaccaatatttccggcttccaggctcggaaaaaccatcacattggccttgccctgtagcgggctggcaggcgctttttgcgccgccacttccggcacgaaggcggcgtcaaactgtaactcgccatccaccaccagctttggtgcgcgctcacggacgatttctgtcgcctgctggacgttagcaacacaggggtgacgggcgctaccattgctggaaaagctcagcatcgccacgcgcggctcttctccggtgatggcgcgccaggtttcggcactggcaagcgcgatatccgccagctgcgccgccgtcggctgtggcaccacgctgcaatcggcaaagcccaacgccgggccgctgtactgtggcaacatcaggaaaatggaagagagcgttttacagcctggctgcaagccgataatgcgtaatccggcacgcagcacatttgccgtggaagagaggttgcccgcgatacagacatccgctttaccggcgctgaccattgctgcggcgaacatcagagggtcggtaagtttttccagcgcatccggcggcgttttttcgcccgcgcgggccagccagcgatgagcaaattcttcccgcattgcgaggttgccatgcggatcaatcacctgtagcccgtccatcgccacgccgtgactgagcgcaaactgacgaagttcaaacggattggcgaccagaatgggcgttgccagaccttgttgatgtaaatattgcgcggctttcagcacacgttggtctaacgcatccggaaaaaccactctggcgggcgctcgcaacgccagttcacgacaacgttcaataatcattgcgtttcccccagtcgttgttggatctgcttcaccgttagcggctgcttcgttacgctcaggatcatcatcacgtagaccgtgctgctaaggcggttcagcgcctgcaaaatgtccgggcgtaatacttcaaagctgcgggtgataaagacctgcgccgctacggtttcggtttcccgcactttggtgcgtagcagattgagcaacgcagcatcgcgcccgtggctggcttccggcaccagatgatcgtggtcgagatagcgcagcggctgatgagaaagccgatgcagatcttcgtcagaaagcccgacaatcgcctggcagcccagcggttcccccagcgcatcggcgcgcataatgttgccaagacggctacggatatccgccagccacggctgccacggttccgccagttcaatttgcagccacactgccagcgcaatggtgctgtcgagaaccgcgcgaaaacccagacgcggatcgcttttggcgaccattttttccgcgctcaggtgagtcagcgtatccggcttttttgccaccggctggcgacacagttcgcagcacgcctgcggatgttcatcgctactggtcagcccatgaacgggctgcggctgctgctgttcatcgtcaacaaacaggcggccctgctcgtcaataaacttgatgcgcagatggcggctttccagcaactcccgggcagagggcgtcaggcgactgtccgcagggagatggatctctgcgccttcgctgagcgtatggttcgctcttagccatgcttcggtgatgaaatctttcatagggattgccagttagccggccaggcgacatacaggaatttcacgctggatgtcgtaccaaattcgatgctggagcctttcgggataaacatcacgtcgcctgctttggcgatcatggtttggccttcgtggcgaacatgcagctccccttccagcaccatgtcgatttcgtcgtagttcagggtccacgggaagaatgcgttctcccactgcataaaaccggcggccatgctgctgccgtcgtctccggtcacaagatcagtcaagcccacgcaatgcggctctgcgccgtcgaaacgaccaaacttgacgctactgccatcaatcactttgatgccgcctttgccggtcacgcttttgaagctcggctgcattgcgccctgctccaggctctgtttttccttcatcactttttccatcagctgtgcgaccaggctttcggtaaactggccttccggcagctgggcaatgatggtttcgcggatgcgctggctttcggttttgtcggctggcacgctggcgggcacggacgccgttaccgggatgctttcatcacattcggtgatggtaaaacccagtagatccgccacttcacgggcttccggggtaataatgctggcgcgcagaaccacggacattgcctgttcgccgcgcgcgtgtgcttcacgaatatcattcgctgtgatgagttttttcacctgcttcctcctgtttggtgagagatgccagataatccaccagttgctgcacgctttgcgggtcgtggctgtttagctcgaacatcggctcttcgaaacccgtctcaagcaataactttcgcgttgcggcgacgtcagcatctggcatgtccgttttactgatgacggcgatttgccgtttgctgacgccaatatccagcaacccggcaggcaaccgactttccgggtcatttgcgccatggacatagatcagcatgtctacatcctgtagcgtggtaattaaggcgtgataccagcggggatggttaaaatattcacccggcgtatcaatatcgcccttatcattaaattccacggcctgtgtttttctggcgagggtataattcccctgcaacgcattaaataacgttgtttttcctgccccgacgctacccacaaacgcaattcgtttcatgaatgcctcgtattaacttttggtcatttcacaaagcgtataatttaataagcgacctaaaccgctgacggtttgacttaacgcttcttctactgcgcccacgctgccataaatcaccaatgcaccgctgaatcggtcgagaaaaccgatatgcacatcagcggctttcagcgctaaatcaccggcgatcatcgccgtttcgccgggagttagcgtcataatgccaattgcgcccgcatccggaacgccgattttcttcgccagttcctcaccgggatgcgcgatgagatgcgccagtgtgacctgtttgccgggcacaaattcctgaatgatgcgttctttatccatgagtcgccgcctgtgaaaaactttcgtgtatcgtgacaatttttcgtcagagtaaataacaaaattcggcaagcgcgtttaaaaggtgaggtagatcactaagaatggagagatattcgctgtggtgcataaactttcatatgcaacgcatgaatataaataaaataatatcgagatattatatagactgcttttttttattattcgcaaactcagtaataagctttactaatatattgcagctaaactgcttaccctgaatattcagggtaagcgtgagagttaaaaaaaattacagcggttgggtttgcgcttctaccacggccagcgccaccatgttgacgatacgacgcacgcttgcgatcggcgttaacacgtgaaccggtttcgccacacccatcagcaccgggccgacagtcacaccttcgctgctggaaacacgcagtaagttgtaactaatgcgggcagcttccatgttcggcatcaccagaatattggcggaacctttcaaagagctgtccggcatacggtcgttgcgaatcgcttccaccagcgctgcatcgccgtgcatttcaccatcaatcatcagttctggtgcacgttccctgaccagttccagcgcctgacgcattttgctgctgctcgggcagtcagaagaaccaaagttggagtggctcaacaaagcaacgcgcggctcaataccaaaacgacggacagtttctgccgccatcaaggtgatctccgccagctcttctgcatccggttcatcattaacatatgtatcggcaataaaggtgttaccactcggcagcagcagcgcgttcatggcacctgcggtgtgaacgccatcgcgataaccaaagacatttttcaccacgctaaaatgttcatgataatcacccaccgtaccgcaaatcattgcatcggcttccccacgctgaaccatgatcgcgccgatcactgtcgggttactgatcagcgcccgctgcgcctgttcctgagtgacgccgcgacgcttcatgatctggaagtattcggtccagtactctttaaagcgcggatcggattcgttattgacgatctcaaaatcaacgcccgctttgatctgcaagcccagtttctgaatgcgcatttcgatcacgttcggacgaccgataaggatcggtttcgccagtcccagcgttaccagttcctgagtggcatgcagaacgcgcgcctcttccccttccggcagaacaacgcgcttcggcgctttgcgagcctgggagaaaatcggcttcataaacaggttggttttgtaaacgaactcagtcagcttgtcgatgtagacgtcgaaatcagcaatcggacgagtcgccacgccgctctccatcgcggctttagcgaccgcaggagcgatcttaacgatcaagcgcggatcaaacggctttggaatgatgtattccggaccaaagctcagatcctgatcgccatacgcactagccaccacttcgctctgttccgcatgggcgagttctgcaatcgcacgtaccgccgccagtttcatctcttcgttgatggcggttgcgccaacgtccagcgcgccacggaagatgaacgggaagcacaggacgttgttcacctggttcggatagtcagaacgaccggtgcaaatgatggcatccggacgcacttctttcgccagcggcggcagaatttccggttccgggttcgccagcgccaggatcattggcgcacgagccattttcttcaccatttcctgggtcagcactttcgggccggaacagcccaggaaaatatccgcgccttcaatcacatcatcgagggtacgtttgccgtcatccaccaccgcatatgcggctttggtttccgccatgtttggctcacggccctgatagataacgcctttactatcgcaaaccacgatgttatgtttttgcagacccagcgctaccagcaggttcatacaggcgattgctgcggcacccgcgccggaaaccaccatccgcacgtcggagatgtttttctccaccacgcgcaagccgttgaggatggcggcagtgctgataattgccgtgccgtgctgatcgtcgtggaataccggaatattcatccgctcgcgcagtttctgttcaatatagaaacattctggcgctttaatgtcttcgaggttgatgccgccgaaggttggttcgagcgcggcgacaacttcaataaatttgtccgggtcgagttcgtcaacttcaatgtcaaatacatcaatcccggcgaatttcttaaacagaacgcccttgccttccatcaccggtttgcctgccagcgcgccaatgttgcctaaccccagcaccgccgtaccgttagagatcaccgccaccaggttacctcgggcggtatatttgtaggcttttaacgggtctttttcgatttcaagacaaggtgcggcaacgcctggactgtaggccagcgccagatcgcgctgtgttgccagaggcttggttggagaaacctggattttccctggaactggaaattcatggaaatcaagtgcactttgttttaactggtcatccatttggttgttcctttcacgtaacgttcacaaataaagtgtgtgggcaacagcccctgcccacaacgtggcgcacattattaccctgccggagtctacagactttgagcaagtccaaactctcaccattaatataatgttttggtaataatcctataacactgatgttacctgcttaatccagcaataccatgcctgtctgctatgcttttttgatgcgtttagcgaaatttctcagaagtgtgaattaacgcactcatctaacactttacttttcaaggagtatttcctatgaacgagttagacggcatcaaacagttcaccactgtcgtggcagacagcggcgatattgagtccattcgccattatcatccccaggatgccaccaccaatcctagcctgttactcaaagctgccggattaagtcaatatgagcatttaatagacgatgctatcgcctggggtaaaaaaaatggcaagacccaggaacaacaggtggtcgcagcgtgtgacaaactggcggtcaatttcggtgctgaaatcctcaaaatcgtacccggtcgcgtgagtacagaagttgatgcacgcctctcttttgataaagaaaagagtattgagaaggcgcgccatctggtggacttgtatcagcaacaaggcgttgagaaaagtcgcattctgatcaagctggctagcacctgggaaggaattcgcgcggcagaagagctggaaaaagaaggtattaactgcaacctgacgctgctgttttcttttgcacaggcacgggcctgtgcggaagcaggcgtttttctgattagcccgtttgtcgggcgtatttatgactggtatcaggcacgcaagccgatggacccgtatgtggtggaagaagatccgggcgttaaaagcgtgcgcaatatctacgactactataagcaacaccactatgaaaccattgtgatgggcgcgagcttccgtcgcaccgaacaaatcctcgccttaaccggctgcgatcgactgactatcgcaccgaatttactgaaggagctgcaggaaaaagttagcccagtggtacgtaaattaatcccaccttctcagacgttcccacgcccagctcccatgagcgaagcggagttccgttgggagcacaatcaggatgcgatggcggtagaaaaactgtctgaaggcattcgtctgttcgccgttgatcaacgcaaactggaagatcttcttgccgccaaactataaaccagccacggagtgttatatgtcccgaaaagaccttgccaatgcgattcgcgcactcagtatggatgcggtacaaaaagccaactctggtcatcccggcgcgccgatgggcatggctgatattgccgaagtgctgtggaacgattttcttaaacataaccctaccgacccaacctggtatgatcgcgaccgctttattctttccaacggtcacgcgagcatgctgctctacagtttgctacatctgaccggttacgacctgccgctggaagaactgaagaacttccgtcagttgcatagcaaaaccccaggccacccggagattggctatacgccaggcgttgaaaccaccaccggcccgcttggacaaggtttggcgaacgccgtcgggctggcgatagcagagcgtacactggcggcgcagtttaaccagccagaccatgagatcgtcgatcacttcacctatgtgtttatgggcgacggctgcctgatggaaggtatttcccacgaagtctgtagcctggcaggcacgctgggactgggcaagctgattggtttttacgatcacaacggtatttccatcgacggtgaaacagaaggctggtttaccgacgatacggcaaaacgttttgaagcctatcactggcatgtgatccatgaaatcgacggtcacgatccgcaggcggtgaaggaagcgatccttgaagcgcaaagcgtgaaagataagccgagcctgattatctgccgtacggtgattggctttggtagcccgaataaagcaggtaaggaagaggcgcacggcgcaccactgggggaagaagaagtggcgctggcacggcaaaaactgggctggcaccatccgccatttgagatccctaaagagatttatcacgcctgggatgcccgtgaaaaaggcgaaaaagcgcagcagagctggaatgagaagtttgccgcctataaaaaggctcatccgcaactggcagaagagtttacccgacggatgagcggtggtttaccgaaggactgggagaaaacgactcagaaatatatcaatgagttacaggcaaatccggcgaaaatcgctacccgtaaggctagccaaaatacgcttaacgcttacgggccgatgctgcctgagttgctcggcggtagcgcggatctggctcccagcaacctgaccatctggaaaggttctgttagcctgaaggaagatccagcgggcaactacattcactacggggtgcgtgaatttggcatgaccgctatcgccaacggcatcgcgcaccacggcggctttgtgccgtataccgcgacgttcctgatgtttgttgaatacgcccgtaacgccgcgcggatggcggcactgatgaaagcgcggcagattatggtttatacccacgacagtattggcctgggcgaagatggtccgacgcaccaggctgttgagcaactggccagcctgcgcttaacgccaaatttcagcacctggcgaccgtgcgatcaggtggaagcggcggtgggctggaagctggcggttgagcgccacaacggaccgacggcactgatcctcagtaggcagaatctggcccaggtggaacgtacgccggatcaggttaaagagattgctcgtggcggttatgtgctgaaagacagcggcggtaagccagatattattctgattgccaccggtagtgagatggaaattaccctgcaagcggcagagaaattagcaggagaaggtcgcaatgtacgcgtagtttccctgcccagcaccgatattttcgacgcccaggatgaggaatatcgggagagcgtgttgccttctaacgttgcggctcgcgtggcggtggaagcaggtattgccgattactggtacaagtatgttggtctgaaaggggcaattgtcgggatgacgggttacggggaatctgctccggcggataagctgttcccgttctttggctttaccgccgagaatattgtggcaaaagcgcataaggtgctgggagtgaaaggtgcctgatggtgattgccggatgctgattgccggatgcgacgctgacgcgtcttatccggcctacagcgtcttatccggcctacatgtcccgccattttgtttaacgggtgatccacaacgtgggccaggcgtctggcccatgccagttatcgcaggtgggttctgcggcgtaacgcaccaggcgaaaacgctgaccgtcaaagcgccagcgcgcctgaatgccacaatcgcttaatccgcgccctttcgctaaggtcaccagttcacggcttttctcatcaaatgttgcgttcatcagttccagttcattcgtctcctgaccgttgttgaacggcaaacgcaaccgaaccgggcggctagctagtggctttttacggctcacaatccatgccaaatcaatggtgttataggcccctgcctcacagctaatcatcatcagcgctttatcatcagtcagcgcagtgacattcacctcacgacgcaatggatcaaggctgcagcgcagaccattcatccgccagtttccataatccagcaaatcgttgcgttcttcgagactgagtggcgtcggcgttgggttaaccaccgcgacctctttcagcgcaggcgcgggcggtacgctgagcggcggttcgtcccctttcttgatccacgcggtttcactgccaacgcgcttttgctgagcatcaataaacaacaacgctgcttttaagccactcagagaaatggtctgatcgccatcgcgtaaggtgattgccttcccttcctgaatcatctgcaaaaacgcggtgatggttgccgtatcatcggttactaataaccatggactaatccgccacttgtcaccacttaacgccaacggctcgccatctaacagcagccgtggcgctatctccccttcactcgcctccgggctcttcaatccgccgcgctcaatacgtaaaacggcatcggtatgcgccccggcgctgcggctcagggtcatcaccagtccattatgatcgcccgtattacgcgccacgcagaaattttggttattacaggtgacctgccagtcggaaaacgcccgttgcgctggtgccgcccacaccaaagacgtcggcaacaaagcgaaaaaaaagagaaggaaaatgcgatagcgcatggacggtacgaccccagaagttcaaacaaacagcacaagtcgtatcttcgttgcgcaggtagcgcggctcaatcggatttgtcggattgagccaataataaacaacgaaatattattgttatttttcagtccattaaatgactcgtttgcaaatagttaagcaataacaccgtcttaccgtcacgtatctcgccggttttgatcatctccagcgcctggctgaacggcagctcgagcacttcaatatcttcatcttcgacaccgccaccggcgttagcgcgctgattgtcactgtattcggcgataaaaaagtggattagctcagtcacaccgcctgggctcatatacagttcaaataatttgcgcacttcacccacttcatagcccgtctcttcaatcgcttctttgcgaatacacacttccggttcgtcgttatccagcagcccggcgcagctttcaatcagctgcccgctttcattgccattaacccaggtagcgacacggaactgacgaatcagaaccacggtctttttcttcgtgttgtacaggaggatcgtcgcaccattgccgcgatcgtacacttcacgtttatggcggataacttcgccgtctttgcgcgtgagatcgtaagtaatgttgtgcagggtgaaatagttatcggagagaattttgtctttaatgagggtgatttgttgcgtcataccgactccacagcgcgaaatgaacaattatcttacgctgtgaagtcgggtttgtctgcgcaggctatcagtgagatttgacactttttacccccagccagtcaataatcccctgtgccgcatgacgtccttctgccattgcggtaaccaccagatccgcaccacgcacggcgtcaccaccagcgaagattttcggattggtggtctggtaacggtactggctttccacatccgcgatgatgcggccccatttgtctaccgttacaccgtggctctccagccacggcatcccgtgcggattgaagccaaacgccataatcaccgcgtcggctggcatgacaaattcactgccttccaccggcactggacgccgacgcccctgggcatccggctctccaagacgcgtgcgcaggaaacgaatcccgcagacgtgaccttgttcattcagctcaagcgccaccggctggacgttaaattcgaagttggccccctcttcgcgggcgttcttcacttctttcttgctgcctggcatgttagcttcatcacgacgataagcgcaggtgacgttactcgcgccgtggcgcagtgcggtacgcacacagtccatcgcggtgtcgccgccgcccagtaccacgacgttaagtccggcggtattgataaacggctcttccggtagctcttcgagccccatcacctgtttagtgttggcaatgaggaacggcagcgcgtcataaacgcccggcgcatcttcattgggtaaacccgctttcatggaacggtaagtgcctacgccaacgaagaccgcgtcgtattgttccaaaaggctatccaaagagacatctttacccacttcacaattgagttcgaagtgaatccccatcgcgctgaagatttcccgacggcgtgccagcagggatttatccagtttgaaagaaggaatgccgaaagtgagcaagccaccgatttctggatggcgatcgtacaccgtcacccccacgccattgcgggtcagaacatccgcacaggccagccctgccggacctgcaccgataatcgccacccgcttgtccactttggtgacatggcttaagtcaggacgccaacctttcgccaacgcctgatcactaatgtagcgttcaatgttgccgatagttaccgcgccgtgctcatcgcgaatagtacaggcaccttcacacaaacggtcttgcggacaaacgcgtccggtaatttccggcagggtgttggtctggtgagaaagctcgacggcggcgtcgatgtttccggctttcaccagttcaatccactgcggtatatggttatgcagcgggcaggtccattcacaaacgctgtgctcgccgcacttaaggcagcggctggcttcccgttgtgcctggtcggcgcgaaatggcagataaatttcatcaaaaccggttttgcgcgcttcaatcgccagtttatccgactcgccacgcgcgggcgttgcctgcatttgttcgactttactcattaccggcatttcttgcgccgcggtactggcatgccacggttgatgttcctgacgcgcggtgcgcaagcggcgggatttcgccatgccggagagtgcgacgtcagtgaccagttgcagcgcgtccgccgggcaattctcaacacaggcaggaccgttttcgcgccccgcacaaaggtcgcatttatgcgccgtggcttttacttttcctgccgcgacgggtgtcaggacgatttgcatcgtaccaaaaggacaggccaccacgcaggatttacagccaatacacttttgctgattgacctgaatgctgtcatcaacgtggctgattgcgccattagggcagctacgggcgcagggcgcatcttcacaatggtgacaggtcactgcactacgttgctgttgatgtttgataaccgtaattcggggatgaaaatggtgttggctcaggacatgttgctcatcattgtgagccatgacacaggcgatttcacaagcatgacaacccagacattgctgactgttggccataataaaacgattcataacgaccttcttttttggttgtaaaaaccttattctttatatgagtgttgttattacccgacttacaggggaatcggcaatgttcatgtgcccagaataagtaactatttcgctataaactgtggcagatcaaataatcccatcactgactaaattgcgtttcagcgaactggaacattaatgattttttgtggagaagacgcgtgtgattgttaaacgacccgtcagcgccagtctggcccgggcctttttttacattgtgctgctgagcattctttccacgggtatcgctctgctaactctggcgagcagtttgcgcgacgctgaggctatcaatattgccggaagcctgcgtatgcagagttaccgcctgggctacgacttgcaaagtggcagtccacaactcaatgcacatcgccagttatttcagcaggcactgcatagtccggtattaaccaacctcaacgtctggtatgtgccagaagcagtaaaaactcgctatgcgcatctgaatgccaactggctggagatgaataatcggctcagcaagggcgatttgccgtggtatcaggccaatattaataattatgttaatcagatagacctgttcgtactggctttacagcactacgctgaacgcaaaatgctgctggtggtggcgatttccctggctggcggcatcggtattttcacgctggtcttttttactttgcgccgcatacgccatcaggtggttgccccgctgaatcagctggttaccgccagtcagcgtattgaacacgggcagttcgacagcccgccgctggataccaacctgccgaatgagcttggtctgcttgcaaaaacctttaaccagatgagcagcgagctgcataaattgtaccgtagcctggaagcgagtgtagaagaaaagacccgcgatctccacgaggccaagcgtcgtctggaggtgttgtatcagtgtagccaggcgctgaacactagccagattgatgtgcattgtttccgccatattttgcagattgttcgcgacaatgaagcggctgaatatctggagttaaatgtcggtgaaaactggcggattagcgaagggcaaccaaacccggaattgccgatgcagattttaccggtgacaatgcaagagacggtttacggcgaactgcactggcaaaatagtcacgttagtagtagtgaaccgctgcttaacagcgttagcagcatgctgggacgcggtttgtactttaatcaggcgcagaagcattttcagcaattattgttgatggaagaacgtgcgaccatcgcccgcgaattgcacgacagcctggctcaggtactttcttacttacgtatccagttgacgttactgaagcgtagcataccggaagataacgccaccgcacaaagtatcatggccgatttttcccaggcgttgaatgatgcttatcggcagttacgcgagctgttgactactttccgcctgacgctgcagcaggcggatctcccctccgcattgagggaaatgctggatacgttacaaaatcaaaccagcgccaaactgaccctcgactgccgtctgccaaccctggcactggatgcgcaaatgcaggtgcatttgttgcaaattattcgcgaagcggtgctgaatgcgatgaagcacgccaacgccagcgaaatcgccgtcagttgcgtcaccgcgccggacggcaatcacacggtttatatccgtgataacgggattggtatcggtgaaccgaaagaacccgaaggtcattatggtctgaatatcatgcgcgaacgcgcggaacggctaggtgggacgctgacttttagtcaaccttccggcggcggcacgttagtgagtattagctttcgctctgcggagggtgaggaaagtcagttaatgtaatgcctcctactgaccaaagaatacttgcacttaaggttcagtataaaagggcatgataatttacattaactcctttttttctccacgattggctcgtaccttgccgctacagtgaagcaagtcaagcctacaacgatacgcagaaacacgaggtcctcttttaatggcgaatttctttattgatcgccccatttttgcctgggtgctggcaatcctgttgtgtctgacaggtaccctggcgatttttagtttgcccgttgaacaataccccgatctcgcgccaccgaatgtgcgagtgaccgctaactatcccggcgcaagcgcccagacgctggaaaacaccgtgacccaggttatcgagcaaaatatgaccggcctcgataatctcatgtatatgagttctcagagcagtggcaccggtcaggcatctgtcactttaagttttaaagcaggcaccgatccggacgaagccgtgcagcaagtacaaaaccagctgcaaagtgccatgcgaaagttaccgcaggcggtgcaaaatcagggcgtgacggtgcgtaaaaccggcgataccaacattctgaccattgccttcgtctctaccgatggtagcatggataaacaggatattgctgattatgttgccagtaatattcaggacccgttaagccgcgtgaatggcgtcggggatatcgatgcctatggtagccaatattccatgcgtatctggctggacccggcgaaactcaacagtttccagatgacggctaaagatgtcactgatgccattgagagtcagaacgcgcagattgcggttgggcaacttggtggtacaccttccgtcgataagcaggcgctcaacgccaccattaacgcccagagtctgctgcaaacaccagaacagttccgcgatatcaccttgcgggtcaatcaggacggcagtgaggtaaggctgggcgatgtcgccaccgtcgaaatgggggcggagaaatacgattatcttagccgcttcaatggtaagccagcctccgggctgggggtaaaactggcctccggcgctaacgaaatggcgacagcggagctggtgctcaatcgtctcgacgagctggcgcagtatttcccgcatggactggaatacaaggtggcgtatgaaaccaccagctttgttaaagcctccattgaagacgtggtgaaaacgctgctggaagctatcgctctggttttcctcgttatgtatctgttcctgcaaaacttccgcgccacgctgatacccactatcgccgtgccggtggtgttgatgggaaccttctccgtactttacgccttcggttacagcgtcaacaccttaaccatgttcgcgatggtgctggcgatcggtctgctggtggatgacgccatcgtggtggtggaaaacgtcgaacgtattatgagtgaggaaggactcactcctcgcgaagccacacgtaaaagcatggggcagatccagggggcactggtcgggattgcgatggttcttagcgcggtatttgtaccaatggccttcttcggcggcaccaccggtgccatctatcgccagttctctattaccattgttgcggcgatggtgctgagtgtactggtagcgatgatcctcactccggctctgtgtgccacactacttaagccactgaaaaaaggtgagcatcatgggcaaaaaggcttttttgcctggtttaaccagatgtttaaccgcaacgccgaacgctacgaaaaaggggtggcgaaaattctccaccgtagcctgcgctggattgtgatttatgtcctgctgcttggcggcatggtgttcctgttcctgcgtttgccgacgagcttcttaccgctggaagaccgtggcatgtttactaccagcgtacagttgcccagcggtagtacgcaacaacagaccctgaaagtcgttgagcaaatcgagaaatactacttcacccatgaaaaagacaacatcatgagcgtgtttgccaccgttggttctggccctgggggtaacgggcaaaacgtggcgcgaatgtttatccgcctgaaagactggagcgaacgcgacagtaagaccggcaccagctttgccattatcgagcgtgcaacgaaggcgtttaaccaaattaaagaagctcgcgttatcgccagcagcccgccagcaattagcggtcttggtagttctgcaggttttgatatggagttgcaggaccacgctggagcgggtcacgatgcgctgatggcagcacgtaatcagttgctggcgctggcggcggaaaacccggagctaacccgtgtgcgccataacggcctcgacgacagtccgcagttgcagattgatatcgaccagcgtaaagctcaggcgctgggcgttgctatcgacgatattaacgacacactgcaaaccgcctggggtagcagctatgtgaatgactttatggatcgcggtcgcgtgaagaaagtctatgtgcaggcagctgcgccgtatcgcatgctgccagatgacatcaatctctggtatgtccgaaataaagatggcggcatggtgcccttctctgctttcgcgaccagtcgctgggaaacaggcagcccgcgtctggaacgctataacggttattctgcggttgagattgttggggaagccgcaccgggggtcagtaccggtacggcgatggatattatggaaagcttagtgaagcagctgccaaacggctttggtctggagtggacggcgatgagctatcaggagcggctttccggcgcgcaggctccggcgctgtacgccatttccttgctggtggtattcctgtgtctggctgcgttgtatgaaagctggagcgtgccgttcagcgtaatgctggtcgtgccgctgggggtaatcggcgcgctgctggcaacctggatgcgcgggctggaaaacgacgtttacttccaggtgggcctgttaacggtcattggtttaagcgcgaaaaacgccatcctgatcgtcgagtttgctaacgagatgaaccaaaaaggccacgacctgtttgaagcgacgctccacgcctgccgtcagcgtttacgcccgattctgatgaccagcctggcatttatcttcggcgtattgccaatggcaaccagcacgggtgccggttccggtggtcagcatgcggtgggtactggcgtaatgggcgggatgattagcgccactattctggctatttacttcgtgccgctgttctttgtgctggtgcgccgccgcttcccgctgaagccgcgcccggaataagcaataaaaaaggcgacatgccaatgtgtcgcctttttcaactttccgattaagaacctgctcagcgggttcttgctgtttgtactttgtctcaggaattacttacgaagcataacttcgataaagtctttccagttccccagttcacgttcaatcataacaacctctcttataattatgggtattctacggaaacaatataccgtggtgaagctaatttactcgattgctgcgatgactacctccgggggacaaatcttatgtaaatactatggtcctgcggtgatgatttgtatgtgatacacagcaacatttcgagatattcatacggcatctaatactgatttaattctggttaaaatacagacagataacaagatgaatattcttaatgtttacgttaaaaatgtttaatattatttaatagttgttaatttgaatacttcgataatgttatatttcctgataatcatttgcaggcaaaatgttttcacccttaaatgagtatttattctcataaatcgaaaaaggattcattatggttacactttacggtatcaaaaattgtgacaccattaaaaaggctcgccgttggctggaagccaataacatcgactatcgttttcatgattaccgcgtcgatgggctggacagcgaattattgaacgattttatcaacgaattaggctgggaagcgttactcaacacccgtggtacaacctggcgtaaactggacgaaaccacccgcaataaaatcaccgatgcggcctctgcggcggcattaatgactgaaatgcctgcaattatcaaacgtccattgctctgcgtgcccggtaagcctatgctgctgggtttcagtgattccagttatcagcaatttttccatgaggtgtaatctatgagctgcccggttattgagctgacacaacagcttattcgccgcccttccctgagtcctgatgatgcaggatgccaggctttgttgattgaacgtttgcaggcgatcggttttaccgttgaacgcatggactttgccgatacgcagaatttttgggcatggcgtgggcagggtgaaacgttagcctttgccgggcataccgacgtggtgccgcctggcgacgccgatcgttggatcaatcccccgtttgaacccaccattcgtgacggcatgttattcgggcgcggtgcggcagatatgaaaggcagcctggcggcgatggtggtggcggcagaacgttttgtcgcacaacatcccaaccatacggggcgactggcatttctgatcacctctgatgaagaagccagtgcccacaacggtacggtaaaagtcgtcgaagcgttaatggcacgtaatgagcgtctcgattactgcctggttggcgaaccgagcagtatcgaagtggtaggtgatgtggtgaaaaatggtcgtcgcggaagtttaacctgcaaccttaccattcatggcgttcaggggcatgttgcctacccacatctggctgacaatccggtacatcgcgcagcacctttccttaatgaattagtggctattgagtgggatcagggcaatgaattcttcccggcgaccagtatgcagattgccaatattcaggcgggaacgggcagtaacaacgttattccgggtgaactgtttgtgcagtttaacttccgcttcagcaccgaactgactgatgagatgatcaaagcgcaggtgcttgccctgcttgaaaaacatcaactgcgctatacggtggattggtggctttccgggcagccatttttgaccgcgcgcggtaaactggtggatgcggtcgttaacgcggttgagcactataatgaaattaaaccgcagctactgaccacaggcggaacgtccgacgggcgctttattgcccgcatgggggcgcaggtggtggaactcgggccggtcaatgccactattcataaaattaatgaatgtgtgaacgctgccgacctgcagctacttgcccgtatgtatcaacgtatcatggaacagctcgtcgcctgatgagtggttctgcaagaggaaataagcatggactggctggctaaatattggtggattctggtgattgtctttttggtaggcgtcctgctgaacgtgattaaagatctcaagcgcgtcgaccataagaaatttctcgccaacaagccggagcttcccccgcatcgtgatttcaacgataagtgggacgatgacgacgactggccgaaaaaggatcaaccgaagaagtaagctgagtgctcaaccgtaggccggataaggcgttaacgccgcatccggcaatggtgaacgatgcctgatgcgacgctcacgcgtcttatcaggccaggtaatctgtcttttacatcatttcaatcacatcatcatcgccaggcttaccgccacttagcgcttcgtcgaaataatgtttcggaatggtataacgcaagtgatccagggcaaattgcatactgcgattgtcgatcgcatggcctaaatcctccacgatatccagcgtcacgtcaccaccggcactgattaacgcttcctgcgccgcaaccgcatgcgccagatcgataaccggatcttcaccgccatgaatcaggtgaattgtcgtggctgtagacgcagtttccggcaggctcgcatagcgtccgttaaaagcaatgacgcgactagcaaggcccggttcggctttaatgctctccagcaccataatcgcgccttgagagaaaccgatgagcgccgtggcgttagcccctactccgctctgtttctgccagtagcgcaccgtttcaataaacgtcggcatgatcgcatccacacgcgcctggcgattatcttccgtaataccctgcacgctaaaccactgacgccccgccggattaccgctcggctccgcgccaccgacactcaccaccagcgcatcaggaaacagcggtgcaaaccagttgcctatttcccccattgccaccgggttatccccgacaccgtggaaaagcagtaacaactgttgcgcaggtttatccgggctttgaacaacaaaatggtcatgtttcatggcgaactccttaactgatgtcattaattttacgccgctgactcacaatgaccatgagataaaattgaaggagtcagtgaaataattgccattgcgttatgcgatcgcgcagacgctcagtgcgaacatcattaagtgcgaacagcgcctgcgcggcctcttcccgctgacggaccagtaacatcttgcggccactaagtttaagtgtggtacataactgcgcatcactggcgtttttctgtaaacgcccacgcagcgccggtaatgccagttcactggtttgtaacagacgcaataagcaacctaagctcgttaatagcggacgatgagcgaaagcaaaaccggccagttcaagccagtcgtcgtcagaaaggacggcatcgtttagtggatcaacaggaagcgtttcgccattccactgcgcgagagcttgcgcatcgcgacgtaaacggtaatgctcacgttcagccagctgtttacccgcatcactcatcggtaacagcgccatcgccgtatagcaaccgctgctggcttcccgatgattacccatccgcaccagcacaaaaccgcagcgttgccagaaacgccataactccccggtgtaaccaaaactcacgctaagatagtcgaggtcttgcgtatattgcaaagcaccagcaataagttgccgccctgtgccttcccgctgacgagccggatgaactgctatccggctgacccgccgtccacgcaatgtcgccgccagtggattgttgccgtgcgccgccaggctctgggccaccagattaccccgcgggcgacgaaaacctgcccataccgcctgactgagttgttgagataatccaccctcatccaccagccacagcgccccggcaatctcgttttcgccagccgcctgtaaaaaatgttgccctggtgcatccatcatccggcgtaaatccagcgggctagtccgatagtgcgcaccagacaagagctgataaacctttaacggcgtttctggatcgctttgccataacgtctgttcaaatgcggaaatgacaatattgccttgtggtgtatgggtgaagttttcatcgtcaaaaaccagtgcctcgctgaccattttttccagcgggcatccctgcgcccagcggatcggctgttgcagttcaaaacggtgtaaatgcggaaagcgagcgcaaaatttcagcaaaaaaccacgtccggtgccttcgtagccctgcaccgtagtggttaacaacgttcgaggaaaacggcttaccagttgatgcaacaatggcgcaggtatggctgcggcttcatcgaccaccagccagtcggcttgctcatcgctggctaacaaggcatccggcgcaataaagcgaaacttctcgcccgcaaattgtgccagtacatccgtactcgcttttgcgggcgcggtgacaatcgctctgcccgcaatacgagaaatgagttgccctgccaacgcgctcttaccgcgcccacgcgcagccgttaccgctgccacgcccggcggcatggtcattagctgctttaagagttgctgttgttctggttgtggtgcgccagtcgcggggtaccagtcagtacggggagtaaaatgcgccaagctgaatggctggttttgccgccagaggatagcctcgttatccgccgtaagtacgcgtttgagatgctggacaaaatgcggcgtcgcaatagggtcagggcaatcactccagcgcaggctgtcggcatcaggttggttttcccactcttcccatacagggagtaacaaaaccagccagcttcccgctttcaacgttccgctaagtgcggcaaaggcagcggcatcaaagccgtggcgggcgtcgaataccgcatgccggaactcgcgcccaagtaaagtttgtagtgcgctgggagaacagtggttttcagcatctggccgcgggctaatccacagccagtcgccaggtaaggcatcacgcaacttaagagtatgctcaaaacaccaaccctcttccccgctcaacaccagcaagcggcggatcccttcacgtttcatttgcgctgttaatgtgtgaagcgcagtcagttcagccatccctgccccggaagttaaatgcttttaccaaaagtattgcattgtgccggatcgccgctgtcgaaaccacgtttaaaccagctgtagcgttgctgagaagtgccatgagtgaaactgtctggtactactcgcccctgactttgctgttgtaaacggtcatcgccgatggcctgcgccgcgttcagcgcctcttccagatcgccggtttccagaacgccttgctgctgcatactatgcccccagacaccggcaaaacagtcggcctggagttccatacgcacagataagcggtttacttccgcctgcgtcgcgttttgttgcagttgacgaactttcggctcgatgcctaacagtttctgcacatgatgaccgacttcatgggcgataacgtacccctgggcaaaatcgccatccgcgccaagtttgtctttcatgtcatcatagaaggagagatcgatataaaccgtgccatccgccgggcaatagaacggccccattatggactggcccgccccgcagccggtacgcgtcattccacggtacatgaccagcttcggttgctgataggtcttacccatcttctcgaactgttgtccccaggtgtcttccgtggttgccagaatcacgctggtgaattttgcggcttcgtcttcatttgggctaatactccgcgtactttgttgttgggaaaccggctgcccggtcatcaacccggttaaatcaacaccatagtagcctgcaaccagcacgactatcagtaaaatcagcccgcctttaccgcttggcaggcgaaaaccgggaccgcccatagatggaccaccagagctgttgcgcctgtcttcaacattgtcactttcacgtcgcccttgccaacgcatagatacctcaacaatatattcattatagaaatgatcgtaggtggttcagaggaagattaccacaggaaagcgggatgaaatggcggaggaatgagcgttcaatgcatatattccgagagcggttgtcttgccgtgccagctgcacggcaagatgatgaacagaaaaatcagtccagctgtacacccaggcggcgggcgacggcttcataggcttcgatcaggccaccgaggctctggcggaaacggtctttgtccattttctccagcgtttctttgtcccacaggcggctaccgtccggggagaactcatcacccagtaccacttcgcctttgtacagaccaaattccagcttgaagtcgaccagaatcagaccagcatcatcgaacagttttttcagcacgtcgttcgctttgtaggtcagctctttcatacgcgccaggttctctttgctcacccagccaaaggtttcgcagtaagattcgttgaccatcggatcgtgcatggcgtcgtttttcaggaacagatcgaacagcggcgggttcagctcaataccttcttcgattccaagacgtttcaccagagagccagcagcacggttacgcacgacacactcaaccggcaccatatccagctttttcaccagacattcggtatcggagagcagacgctccatttgagtcgggatacccgcttcagccagtttgctcataatgaagtagttgaacttgttgttcaccatacctttgcgatcaaactgctcaatgcgcgcgccatcccctgcactcgtatcattgcggaattcgagcaccaacaggtccgggttttccgtgctgtatacggttttcgctttaccacgatacaactcagcttgcttttgcatctttatcactcctgggtgtgaattaacgttttaaaatcttttgctgtctggtgtgccggatgttttgtcggatgcggcgtgaacgccttatccgaactacgtccgacaaacaaatttcgtgcgaattaccgctaaaatcgcgttttcctgcagacgcacacgtttgcgtatcatatcagaaaaaagggccggatgattccagccctgtatttttacttgctaaacgcagcctggaagacagctaccagcgcgtcgttctgactctgagtcagagtatgacctttcggatcgatgaactgtaggctgctgcggttatctaaatcgccaacctgcagtttatagtcaccggatgccaggcctggatcgctcgcgcccagttcctgccagtcgctgtcagacagcggcttataagttacggccatgttgccctggctacgggtgctgtcggtcactttcatgcccactttttccagcgccgctggcagacgttgccaaaccacattgaacggcccgcgtacgaccagcattggtaaaccggtgtcatcagctgcactttgtacgtccatagtggtggaggcacgattttgcgcagcgttcgcggcgtcagtggcagatttatccagaccggcggaaataacgttcatcatctccgtgctgtaacgctgcatggaagccgcgtctgcaaccggtttgcccgcctgttccaggttcagcagtttaaccgtaaccgcctgctgataaccctgcggcttaacagagatttgataacgaccacgatactgctcgtcttcgtccagacggttccattgtacccaatcggtggtcagtgtctgaccagcatcatcacgttgggtgatggtgtagtttttcgcctgcagcacgctaaccacctgcggccacagagtattgccacgaccattttccaccagcaaactagcggtatcgcccgtgaactgggtacgcgcgccagaaaccagtgccagcggctgggctggtggacgaatgtccagcgccttaccgacagcaccactaccgttggtcaccgggattgcataatcaccggaggtcaccggcaaaatcattccagccggggcatgaagctccgcaagcggtgccgcttccaggtaggcttcatcaccactgacctgacgcttatagcgactgtcagaactacaggcagcgagtaataaaacaaggctaacacccgcaacctttgccaggcggctcttttgaacagagtaagccatcaaatctccctaaactttacagcaaaccggcatgcttaagcgccgctctgaccgtctcacgaccactgtcggtgattggtgtcattggcaggcgcagcgtatcggtcgccacaagacccagttccttacatgcccatttcaccgggattggattgggttcgacaaatagtttgttgtgtaatggcatcagacgctgattaataacgcgtgcctcggcaaaatgcccttctgctgccagtttgcacatctgggccatatcacgcgctgcgacgttagccgtaacggaaataaccccatgaccgcccaattgcatgaagtccagcgcgctcgcatcatcgccgctcagcagaacaaaatcatcactaaccagctctttgatctggtttacacgcgttaagttccctgttgcctctttgattccgataatattttttactttcgccagacggcccaccgtttccgggagcagatcgcagccagtacgggacggcacattatacagaatttgcggcaggtcagtatgctcagcgatggctttgaaatgctgatacaaaccttcttggctcggacgattgtagtaaggggttaccgtcaggcagccgacgataccactgtcattgaagcgctgcgtcaggctaatggcttccgcagtagcgttagcgccggtcccggcaattaccggaatgcgcccatcagccagatccagcgtcatcatcaccacatcagcatgttcgtcatgatttaaggtagcggactcgccagtggtgccaacagaaacgatcgcgctagtaccgctggcgacatgataatcaatcagttttttcaagctagcccgacagacattacctttttcatccatcggagtaacaatcgcgacaatacttcccgtgaacatgggccatcctctgtgcaaacaagtgtctcaatggtacgtttggtatggcattaaaagcaagcagacagaaccgttctgattgttgtatgcatgtttttttatgctttccttaagaacaactcaccccttaaaggaataaccagtttgacactgagtagccaacattatctggtgatcactgcgttgggtgccgatcgccctggaattgtgaacaccatcacccgtcatgtcagtagttgcggctgtaatattgaagacagtcgcctggcgatgctgggagaagagttcacgtttattatgctgctttccggtagttggaatgccattactctgattgaaagtacgttaccgttgaaaggtgccgaactggatcttttaatcgtgatgaagcgcacgacggcgcgtccgcgtccgccaatgccagcatctgtctgggttcaggtcgatgtggcagactccccgcatttaattgaacgcttcacagcacttttcgacgcgcatcatatgaacattgcggagctggtgagccgcacgcaacctgctgaaaatgaacgggctgcgcagttgcatattcagatgaccgcccacagccccgcatctgcggacgcagcaaatattgagcaagcgttcaaagccctatgtacagaactcaatgcacaaggcagtattaacgtcgtcaattattcccaacatgatgaacaggatggagttaagtaatgaatccactgaaagccggtgatatcgcaccgaaatttagcttgccggatcaagacggagaacaagttaatttgaccgacttccagggacagcgtgttctggtttatttctacccgaaagccatgacccccggctgtaccgtacaggcctgcggcttacgcgataacatggatgagttgaaaaaagcgggcgttgatgtgctgggtatcagcaccgataaacccgaaaaactctcccgttttgcggaaaaagagctgcttaactttacgctcctgtctgatgaggaccaccaggtgtgcgaacaattcggcgtctggggtgaaaagtccttcatgggcaaaacctacgatggcattcatcgcatcagcttcctgattgacgctgatggcaaaatcgaacatgtctttgacgatttcaaaaccagcaatcaccacgacgttgtgctgaactggctgaaagaacacgcctgattactttgctccattccgtgctggctgcgcttgcggccagcatacctcacttctcgtgatcaagatcacattctcgctttcccctgcgacacgggtgtcgaatccattttttgctgaacgttaatgaccatcatttttgtaccgttcagaatccagttaatacataacttattgaatatattgagttaatcagaatggcatcctttatgcaatatgaaatgcaatgtttcatatcattttcaaggagccgacatgaaccgctttgtggtggccgaaccactgtggtgtacaggatgtaatacctgtctcgctgcctgtagcgacgtgcataaaacgcaaggtttacagcaacacccgcgcctggccctggcgaagacgagtacaatcactgcccctgtcgtgtgtcatcactgtgaggaagccccttgcctgcaggtctgcccggtcaatgccatctctcagagggatgatgcgatccaactcaacgaaagcctctgtattggctgcaagctttgcgccgtggtctgcccatttggcgcaatcagcgctagtggaagccgtccggtgaatgcccatgcgcaatatgtttttcaggctgaaggcagtctcaaagacggcgaagaaaacgcgccaacacaacatgctttgctgcgctgggaacctggtgtccagaccgtcgcggtgaaatgcgacctgtgtgatttcttgccagaaggtccggcctgcgttcgcgcttgcccgaatcaggcgttacggctgatcaccggtgatagcctgcaacgtcagatgaaagaaaaacagcgccttgccgcaagctggtttgccaatggcggggaggatcccctttccctcactcaggagcaacgctaatggatgccctgcaattattaacctggagcctgattctctatctgtttgctagtctggctagcctgtttttactcggcctggacagactggctattaagctttccggcatcacaagcctggtgggcggcgtgattggcatcatcagcggaattacgcaattacatgctggtgtaactttagtcgcccgttttgcccccccttttgaatttgccgatttaaccctgcgaatggatagcctcagcgcatttatggtgctggttatctccttgctggtggtggtttgttctctctatagtttgacttatatgcgcgaatacgagggcaaaggcgcggcggcgatgggcttctttatgaatattttcatcgcaagcatggttgccctgctggtgatggacaacgctttttggttcatcgtgctgtttgaaatgatgagcctgtcttcctggtttctggtcattgccaggcaggataaaacgagcatcaacgctggcatgctctacttttttatcgcccacgccggaagcgtgctgataatgatcgccttcttgctgatggggcgcgaaagcggcagcctcgattttgccagtttccgcacgcttagtctttctccggggctggcgagcgcggtgttcctgctggcctttttcggttttggcgcgaaagccgggatgatgccgttgcacagctggttgccgcgcgctcaccctgccgcaccaagccacgctagcgcgttgatgtctggcgtaatggtcaaaataggtattttcggcatcctgaaagtagcgatggatctgctggcgcaaacgggtttgcctctgtggtggggcattctggtgatggcgatcggcgcaatctccgcgctcctgggcgtgctatatgcgctggcggaacaggatatcaaacggctgctggcctggagtaccgtcgaaaacgtcggcattattttgctggcagtcggtgtggcgatggtcggtctgagtctgcacgacccgctgctcaccgtggttggactgctcggcgcactgtttcatctgctcaaccatgcgctgttcaaagggctgctatttctcggcgcgggagcgattattagccgtttgcatacccacgacatggaaaaaatgggggcactagcgaaacggatgccgtggacagccgcagcatgcctgattggttgcctcgcgataagcgccattcctccgctgaatggttttatcagcgaatggtacacctggcagagcctgttcagtctaagtcgtgtggaagccgtagcgctacaacttgcgggtcctattgctatggtaatgctggcagtcactggtgggctggcagtaatgtgcttcgtaaaaatgtacggtattactttctgtggtgcgccgcgcagtacacacgctgaagaggcacaggaagtgccaaatacgatgatcgtcgccatgctactgctcgcggcactctgcgtattaattgcgcttagtgccagttggctggcaccgaagataatgcatattgcccatgcgtttaccaatacccctcccgccactgtcgccagcggaatagcacttgtacccggcacgtttcatacacaggtcacccccagtttactgttgctgttactactggcgatgcctttgctgcctggcctttactggctgtggtgtcgtagccgccgcgcagcgtttcgtcgcacaggagatgcctgggcatgcggctacggctgggaaaatgcgatggccccgagtggcaatggcgtgatgcagccgctgcgtgtggtcttttctgcgctatttcgtctacgacaacagctcgaccctacgctgaggctaaataaaggtcttgcgcacgtcaccgccagggctcagagcacagaacccttctgggatgagcgggtgatccgccccatcgtgagcgccacccaacggctggccaaagaaatacagcatctgcaaagcggcgactttcgtctctattgcctgtatgtggtcgccgcactggttgtgctgctaatcgctattgccgtctaaggaaatcaccatgagacaaactctttgcgacggatatctggtcatttttgcgttagcacaggccgtgattctgctgatgctaatcccactttttacgggtatttcccggcagatacgcgcgcgtatgcactcccgccgcgggccggggatctggcaggattatcgcgatatccacaaactgtttaaacgccaggaagttgcgccgacatctagtggtctgatgttccgcctgatgccgtgggtattaatcagcagcatgctggtgctggcgatggccttaccactgtttattaccgtttccccttttgcgggcggcggcgatctgatcacccttatctatcttcttgccctgtttcgttttttctttgctctttccgggctggataccggaagtccgtttgcgggagtcggtgccagtcgcgagttgacgctcggcattctggtcgaaccaatgcttattctcagtctgctggtattggcgctgatagcaggttccacgcatatcgagatgatcagcaatacgctggcgatgggctggaacagcccgctaaccaccgtactggcgttactggcctgtggttttgcctgcttcattgagatgggaaaaattccctttgatgttgctgaagcagaacaggaattacaggaaggcccgctgaccgaatattccggtgccgggctggcgctagcgaaatgggggctggggctgaaacaggtcgtgatggcaagtctgtttgtggccctgtttctgccctttgggcgcgcgcaagaactttctctcgcctgcctgctgactagtcttgtcgttacgctgctcaaggttttgctgatttttgtactggccagtatcgcagaaaacacgctggcacgcgggcgttttttactcattcaccatgtgacctggcttggcttcagccttgctgcgcttgcatgggtcttctggttaaccggtctgtaaggagcactgacggaatatggaaaatcttgctctgacgacgttattgctgccttttatcggcgcactggtcgttagctttagcccacaacgtcgggccgccgaatggggggttttgttcgccgcgctgaccacgctgtgcatgttgagtctgatctccgcgttttatcaggccgataaagttgccgtcacgttgacgttggtcaacgtgggggatgtggcgttgtttggcctggtcattgatcgcgtgagtacgctgattctgtttgtggtggtgtttctcggtttgctggtcacgatctactccacgggttatctgacggataaaaatcgcgaacacccgcataacggcacgaatcgttattacgcatttttactggtgtttatcggcgcgatggcgggactggtactctccagcacgctgctcggtcagttgttgttttttgaaattacaggcggctgctcctgggcgttgatcagttattaccagagcgataaagcgcagcgtagtgcactaaaagcgttacttatcactcatatcggcagcttggggttgtatcttgccgccgccacgctgtttttgcagaccggaacgtttgcgcttagcgcgatgagcgagttacacggcgacgcacgttatctggtttatggcggcatcctgtttgccgcgtgggggaaaagcgcccagctaccgatgcaagcgtggctaccggacgcaatggaagcgccaacaccgatcagcgcctatctccacgccgcaagcatggtgaaagtgggcgtttacatttttgcccgcgctattatcgacggcggcaatatcccgcatgtgattggcggcgttggcatggtcatggcactggtcaccattctttatggctttctgatgtatttgccacagcaggatatgaagcggttgctagcctggagcaccatcactcaacttggctggatgttcttcggcttgagcctctccatcttcggcagccggctggcgctggagggcagcatcgcctacatcgtcaaccacgcgttcgctaaaagcctgtttttccttgtagcaggtgcgctgagttacagctgcggcacgcgcttgttgccgcgtctgcgtggcgtattgcacaccctgccgttgccaggcgtgggtttctgcgtggcagcgctggcgattaccggcgtgccgccgttcaacggcttcttcagtaaattcccgctgtttgctgccggttttgcgttgagtgtggagtactggatcctgctgcccgccatgattcttctgatgattgaaagcgtcgccagtttcgcctggtttattcgctggtttggtcgcgttgtgcctggcaaaccgagcgaggccgtcgccgatgccgcaccgctgccaggaagtatgcgcctggtgttgattgtactgattgtgatgagcctgatttccagcgtaatcgccgcgacctggttgcagtaaggagatgatgaatgaccggttctatgatcgtaaataatctggcgggactgatgatgctgacaagcctgtttgtgattagcgtcaaaagctatcgcctgagttgcggattttacgcctgccagagtctggtgctggtgtctattttcgccactctcagctgcctgttcgccgcagagcaactgctgatctggtccgccagcgcctttatcaccaaagtgctgctggtaccgttaatcatgacttacgctgcacgaaatattccccagaacatcccggaaaaagcgttattcggtccggcaatgatggcactgctcgcggcgttaattgtcctgctttgcgcatttgtcgttcagcccgtgaagctaccgatggctaccgggctgaaaccggcgctggcggtagcgttaggtcattttctgcttggcctgctgtgcattgtcagccagcgcaatatcctgcggcaaatttttggttactgcctgatggaaaacggctcccatctggtgctggcgcttcttgcctggcgagcaccggaactggtggaaataggtatcgctaccgacgccatcttcgccgtcattgtgatggtgttactggcaagaaaaatatggcgtacccacggcacgctggacgtgaacaacttgaccgcgctgaagggataatgagatgagttattctgtgatgttcgctttactcctgctcacgccgctgctttttagcctgctctgttttgcctgccggaaacggagactttctgcgactcgcacggtgaccgtattacatagcttagggatcacactgctgctgattctggcactctgggtggtccaaactgccgctgatgcaggagaaatattcgctgcgggactgtggcttcatattgatggtctgggcggtttgttcctcgccattcttggtgtgattggctttctcaccggtatttacagcattggctacatgcgtcatgaagtggcacacggcgagcttagtcccgttacgctgtgcgattactacggtttcttccatctgtttttgttcaccatgctgctggttgttaccagcaataacctgattgtgatgtgggcggcgatcgaagccaccaccttaagcagcgcgtttctggtaggcatttacggtcagcgtagtagcctggaagctgcatggaagtacatcattatttgtactgttggtgtcgcttttggtctgttcggtaccgtgctggtatacgccaacgccgccagcgttatgccgcaggcagaaatggcgatattctggagcgaggttcttaagcaaagctccttgcttgacccaacattaatgctgttggcctttgtgtttttgctaattggctttggtaccaaaaccgggctatttcccatgcacgcctggctgccggatgctcacagtgaagcgccgagtccggtcagcgccctgctctccgccgtattgctgaactgcgcgctgttggtgctgattcgctattacatcattatttgccaagccatcggcagcgatttccccaaccggttgttgctcatcttcggcatgttgagcgttgccgtggcggcatttttcattctggtacagcgggacattaagcgtctgctggcgtactccagcgtggagaacatggggctggtcgcggtggagctaggcattggcgggccgctgggaatttttgccgcgctgctgcacatcttaaaccacagtctggcaaaaacgctgctgttctgcggttccggcaatgtactgctcaagtacggcacgcgcgatctcaacgtcgtctgtgggatgctcaaaatcatgccatttaccgccgtgctgtttggcggcggtgcgctggcgctggcagggatgccgcccttcaacatttttcttagcgaatttatgaccattaccgccggactggcacgtaatcacctgctgattatcgtcctgctgttattgctgttaacgctggtgctggcgggcctggtacggatggctgcgcgggtgttaatggcgaaaccgccgcaggccgttaaccggggtgatctcggctggttgaccaccagcccaatggtgattctgctggtcatgatgctggcgatgggaacgcatattccacaacctgtcatcaggatcctggcgggcgcttccactatagtcctcagtgggacgcacgatctgcctgcacaacgtagcacctggcatgattttttgcctagtggcaccgcatctgttagcgagaaacacagtgaacgttaatagtagcagtaatcgtggcgaagcgattctcgccgccctgaaaacgcagttccccggcgcggtgctggatgaagagcgacaaacgcctgaacaggtcaccattacggtgaaaatcaatctgctgcctgacgttgtacagtatctttattatcaacatgatggctggcttccggtcctgtttggcaacgacgagcggacacttaacggtcattacgcggtttattatgcccttagtatggaaggggccgaaaaatgctggattgtggtgaaggcgctggtcgatgccgacagtcgggagtttccgagtgtcacaccgcgcgtccctgccgcggtctggggcgagcgagaaattcgcgatatgtacgggctgattccggttggcctgccggatcagcgtcgcctggtgttgcccgatgactggccggaagatatgcatccgctgcgcaaagatgcgatggattatcgactgcgccctgaaccgacgactgattccgaaacgtatccgtttatcaatgagggcaacagcgatgcgcgggtgatccctgtcggcccgctgcatatcacctccgatgaaccgggtcacttccgcttgtttgtggatggcgagcaaattgtcgatgctgattaccgcctgttttatgtccatcgcggcatggagaaactggcagaaacgcggatgggctacaacgaagtgaccttcttaagcgaccgcgtgtgtgggatttgcggttttgcccacagtgtggcctataccaatagcgttgaaaatgcactggggattgaggtgccgcaacgagcacatactattcgcagcattctgctggaagtcgaacggctacacagtcatttgcttaaccttggcctctcctgccatttcgttggttttgataccggctttatgcaatttttccgcgtgcgggaaaagagcatgacgatggcggaattgctgatcgggagccgtaaaacctacggtctgaatctgattggtggtgttcgccgcgatattctcaaagagcaacgtctgcaaacgctgaaactggtgcgcgagatgcgcgccgacgtgagcgagctggtagagatgctgcttgctacgccgaatatggaacaacgcactcagggcattggcattctcgaccgacaaatcgcccgtgatttgcgctttgatcacccctacgccgactacggcaatattccaaaaacactgtttacctttaccggcggcgatgttttctcccgcgtgatggtccgtgtcaaagagacgtttgatagcctggcaatgctggaatttgccctcgacaacatgccggataccccactgctgaccgaaggctttagctataaacctcacgcattcgcgctgggctttgttgaagcgccacgcggtgaagacgtgcactggagcatgctcggtgataaccaaaaattgttccgctggcgctgccgtgccgccacctacgccaactggccggtgttgcgttacatgctgcgcggcaataccgtttctgacgcaccgctgattatcggtagccttgatccctgctactcctgtaccgaccgtgtgacgctggtagatgtgcgcaagcgccagagtaaaaccgtgccgtataaagagatcgaacgctacggcattgatcgtaaccgtagcccgctgaagtaaggacagaagatgctgaagttactgaaaactattatgcgcgccggaaccgcgacggtgaaatatcccttcgcgccactggaggtcagccctggctttcgcggaaaaccggacctgatgcccagccaatgtattgcctgcggtgcctgcgcctgtgcttgtccggcaaatgcgctggctatccagaccgacgaccagcaaaatagccgcacctggcagctctatctggggcgttgtatttactgcggacgttgtgaagaagtgtgcccgaccagagccatccagcttaccaataactttgaactgaccgtcaccaataaagccgatctctatacccgcgcgacgttccatctacaacgttgcagccgttgcgaacgcccgtttgccccgcaaaaaaccatcgcactggctgctgaattgttagcacagcaacaaagtgcgccacaaaaccgcgaaatgttgtgggcgcaagcgagcgtctgcccggaatgcaaacaacgcgcgacgctgatcaacgacgatacagatgtactgctggtggctaaggagcagctatgagtccagtgcttacacaacatgtcagccagcccatcacgctggacgagcaaacgcaaaagatgaagcggcatttgctacaggatatccgtcgcagcgcttacgtttatcgcgtcgattgcggcggctgcaacgcctgtgaaatcgaaatttttgctgccattacaccagtattcgacgcagaacgttttggcattaaggttgttagtagtccgcgtcacgccgatattttgttatttactggcgcagtcacccgggcgatgcgtatgcctgcacttcgggcgtatgagtctgcccccgatcataaaatttgtgtttcctacggcgcgtgcggtgtcggcggcggtattttccacgatctctacagcgtctggggcggtagcgacaccattgtccccattgatgtttggatccccggctgcccgccaacaccggccgccaccattcacggtttcgccgtggcgctcggtttgctgcaacagaagattcacgctgtggattatcgcgatcccaccggggtgactatgcaaccgttgtggccgcagatcccgccaagtcagcgtatcgccattgagcgagaagcgcggcggctggcgggctatcgtcaggggcgagaaatttgcgatcggctcctgcgccatttaagcgacgatcctacaggaaatcgggttaacacctggttgcgcgatgccgacgatccacgtctcaatagtatcgttcagcaactctttcgcgtactccgggggttacatgactgaagagtgcggggaaattgttttctggacgctgcgaaaaaagtttgtcgccagtagcgacgagatgccggaacacagctctcaggtaatgtattacagcctagctatcggccatcacgttggcgtgattgattgtctgaatgtcgccttccgctgcccactgacggaatacgaagattggcttgcactggtcgaagaggagcaagcccgacgtaagatgctgggggtgatgacttttggtgagattgttattgacgccagccacaccgccctgttgacccgggcattcgcgccactggcggatgacgcgacgtctgtgtggcaggcgcgtagcattcaattcattcatctgttggatgaaattgtgcaggaaccggccatctatctgatggccagaaaaattgcgtgagaaggatttctcattaataaggactgttgatggctatgagtgacgaggcgatgtttgccccgccacaaggaataacaattgaagcggtaaacggaatgctcgcggagcggttagcacagaaacacggcaaggcgtctttattacgcgccttcatcccgctgccgccgccgttcagcccggtacaacttattgaactgcatgttctcaaaagcaacttctattaccgctaccatgatgatggcagcgatgtgacggcaacaacagagtatcagggcgagatggtcgattatagccgtcacgccgtccttctcggcagtagtggaatggcggagctacgctttattcgcacccacggcagtcgttttacttcccaggattgcacactgtttaactggctggcgcggataatcaccccggttctgcaaagttggctcaatgatgaagaacagcaggtggcgctgcgtttgctggagaaagatcgcgatcatcatcgggtactggttgatattactaatgcagtgctgagtcatcttgatctcgacgatctgatcgctgacgtcgctcgtgagatccatcattttttcggtctggctagtgtcagtatggtactgggcgatcatcgaaagaacgagaagttcagcctgtggtgcagcgatctttctgccagtcattgtgcgtgtctgccacgctgtatgcctggcgaaagtgtattgctgacacaaacgctacaaacccgacaaccgaccttgacgcaccgtgcagatgatctgtttctctggcaacgcgacccgttattactcttacttgcatctaacggctgcgaatctgcgctccttataccgcttacctttggcaaccatacaccgggtgcattgttgctggcgcatacctcttccactctctttagtgaggaaaactgccagctactacaacacatagccgatcgcatcgctattgccgttggcaatgccgatgcctggcgtagcatgaccgatttgcaggaaagtttgcagcaagaaaaccaccagcttagcgagcagctccttagcaatctgggcatcggtgacattatctatcaaagccaggcaatggaagacctgctccagcaggtagatattgtggcgaagagcgacagtacggtgttgatttgtggtgaaaccggaactggcaaagaggtgatcgccagagcgatccatcaacttagcccgcgacgcgacaagccgctggtcaaaatcaactgcgctgccatccccgccagtcttctggaaagtgagttattcggtcatgacaaaggggcgtttactggtgcgattaatacccatcgtggtcgttttgaaattgccgatggcggcacgttgtttctcgatgaaattggcgatctgccgttagaacttcagcctaaactgctgcgcgtattgcaggagcgggagattgagcgtctcggcgggagtagaacgatcccggtgaatgtcagagtcattgccgccaccaaccgtgatttgtggcaaatggttgaagatcgccagtttcgcagcgatctcttttatcgcctgaatgtcttcccactggaattgccgccgctacgcgaccgtccggaagatatccctcttttagcaaaacatttcacgcaaaaaatggcgcgccatatgaatcgcgcaattgacgccatcccgaccgaggcactacgccagttgatgagctgggattggccgggcaacgtgcgcgagctggaaaacgtgattgagcgggcggtactgttgactcgtggtaacagtctgaatttacatctaaatgtccgacaaagccgtttactgccgacgctaaatgaagatagtgcgcttcgcagtagtatggcgcagttactgcacccgacgacgccagagaatgacgaagaagaacgtcagcgcattgttcaggtattgcgagaaaccaatggcattgttgccgggccccgtggcgcagcgacgcgattagggatgaagcgcaccacgctgctgagtcgaatgcagcggctggggatcagcgttcgcgaggtgttgtaatctgcttttgcaggagtatgcatgagaaacaaactctctttcgacttgcagttgagcgccagaaaagcggcaatcgctgaacggattgccgcccataaaattgcccgcagtaaagtgagcgtctttttaatggcgatgtccgctggcgtgtttatggcgatcggatttactttttacctttccgttatcgccgatgccccgtctagtcaggcattaacccatctggtgggcggcctttgctttacactcggctttattttgctggcggtttgcggcaccagcctgttcaccagcagcgtaatgacggtgatggcaaaaagtcggggcgtcattagttggcgaacttggctgattaacgcacttctggtggcctgcggtaatctggcaggtattgcctgtttcagtttgttaatctggttttccgggttggtgatgagtgaaaacgcgatgtggggagtcgcggttttacactgcgccgagggcaaaatgcatcatacatttactgaatctgtcagcctcggcattatgtgcaatctgatggtttgcctggcgctgtggatgagttattgcgggcgtagcttatgcgacaaaatcgtcgccatgattttgcccatcaccctgtttgtcgccagtggctttgagcactgtatcgccaatttgtttgtgattccgttcgccattgccattcgccatttcgcccctccccccttctggcagctggcgcacagtagcgcagacaattttccggcactgacggtcagccattttattaccgccaatctgctcccggtgatgctgggtaatattatcggcggtgcggtgctggtgagtatgtgttatcgggctatttatttacgtcaggaaccctgaaaaatcagcccggcgaaacagttcgtcgggctgaagattattcttgcgcgatttgcccatcgggccaggcatgaatcacggctttgatcagcgtcgccaacggaatggcgaagaatacgccccagaatccccacaaaccaccgaagatcaccacgcttaaaataatcaccagcggatgcaggttaaccgcttcggagaacaacaccggcactaacaggttgccgtccagcgcctgaataatcagatacaccgcgaagcagctccagaattcagtacctgcgccaaactggaatagcgccacgccaaccaccggaatggtcaccacaaatgcgccaatgtacggaataagaacgctgaagccgaccagcactgccagcagcaggctatagttcagcccgaagagcaagaaccccagccaggtggcgatccccaccacgatcatctccagcactttgccgcggatatagttggtgatttgttgattcatctccttccacacctgtcctgccagcccacggttacgcggcagcacccggcgaacggcgttcagcatctgctctttgtctttcagcaggaagaagaccatcaatggcaccagcaccagatagacggctatggtcagcaaaccgaccaggctggcgagggaaattttcaccacgctatcgcccatggtcagcatccgactgcgcatattttcggccattgcatcaataatgcccgcgtccattaacgccggatagcggcgcggcaacgtggcggcaaagtcagaaagcttattgagcatccccggcatatcgcggattaagtagatgccctgttgccaggcgataggcagtaccacgaacgccatcagtagcaatataccgacgaaaaccaccaatacaatgctcgtcgcccagcggcgggagcagccaatagattgcagacgcacggttggccattccagcaaataggccagcacaatagccaccagcaacggagcaagcaggccactaaagaaaaagataatgccaaatccggcaactaaaataaccagcaaggcaatcgcttccgggtcgctaaaacggcggcgataccattgcatcaacatttcgagcataaagaccttccctgaacctcaagagcgggattgcgatccgcaattgtatcgaaatgtcacaaaaaagacttcgctttttatgacggattcaggaaactgaaaagtcatttgagtgggctaatcttcgccgttacactcaaaggcggcgcggtgggaacgatatttcacagtatcggtcaaatgactatctccagaaatacaggatagaggttatgttcaggcagttgaaaaaaaacctggttgcaaccctcattgctgctatgaccattggtcaggtagccccggcgtttgccgacagcgcagacaccttgccggatatgggaacctccgcaggaagcacgctttccattggtcaggaaatgcagatgggcgactattatgtccgccagctacgcggcagcgcgccgttaattaatgacccgctgttaacgcaatatattaatagcctggggatgcgtctggttagccatgccaatagcgttaagacaccgtttcatttttttctgatcaacaacgacgaaattaacgcctttgctttctttggcggcaacgtggtgctgcactctgccctgttccgttattccgataacgaaagtcaactggctagtgttatggcgcacgaaatctcccacgtcacccaacgtcacctggcgcgagcgatggaagatcagcagcgcagcgcgccgctgacctgggtcggcgcgttaggttctattttactggcgatggccagtccgcaggcggggatggcggcgctgaccggtacactggcgggaacgcgtcaggggatgatcagtttcacccagcaaaatgaacaggaagcggaccgcattggtattcaggtgctgcaacgcagcggattcgatccgcaggcgatgccaaccttcctcgaaaaattactcgatcaggcgcgttactccagccgcccgccggaaattttattgactcacccgttgccggaaagtcgtctggcagatgcccgcaaccgtgctaatcagatgcgcccgatggtggtgcagagcagcgaagatttctatctggcgaaagcgcgcacactggggatgtataattccggacgtaaccagctcaccagtgatttgctggatgaatgggcgaaaggaaacgttcgtcagcaacgagcagcacaatatggtcgtgctttacaggcgatggaagccaataaatacgacgaggcgcgtaaaacgctgcaaccgttactggcggcagaacctggcaacgcatggtatctcgatctggctactgatatcgatcttgggcaaaacaaagccaatgaggcgatcaatcgtctgaaaaatgcccgcgatttacgcaccaatccggtgttgcagctcaacctggcgaacgcttatttgcaaggcggtcaaccacaagaagcggccaatattctgaatcgctacacctttaataataaagatgacagcaacggctgggatttgctggcacaggcggaagccgcgctaaataaccgcgatcaggagctggctgcgcgagcagaaggttatgcgctcgccggacgactcgatcaggccattagcctgttgagtagcgccagtagccaggtgaaattaggcagcctgcaacaagcgcgttacgatgcgcgcatcgaccagttgcgccagctgcaggaacgctttaagccttataccaagatgtaattcgcattaaaggaagaacaatgaccaaacaggtaaaaatctaccataacccacgctgtagtaagagccgggaaacgctgaacctgctgaaagaaaacggcgtggagccagaagtggtgctctaccttgagacacccgccgatgcggcaacgctgcgcgatttgctgaaaatactggggatgaatagcgcccgtgaattgatgcgccagaaagaggatctttataaagaactgaacctggctgacagtagccttagcgaagaggcgctgattcaggcaatggtggataatccgaagctgatggagcgcccgattgtggtcgcgaatggcaaagcgcggattggtcgtccaccggagcaggtactggaaatcgtgggttaagatgtgctccatcgctagttgaagcacattgccggatgcgacgcttgccacgtcttatccggcctacgaatactatggattaacttcgcgtagttcggataaggcgttcgcgccgcatccgacaataaacaccttatttacaacttcagaatttctttcacaaacggaatggtcagcttacgttgcgcggtaatgctcgcacgatccaactgatccaacgtcataaatagcgtgcgcatttctctgtcgagccgcttcagcaagaaacgccccacatcttccggcagttcaaaaccacgcaaacgcgcgcgtaactgtagcgcctgcaacttatcttcatcagaaagtggctgcaatttgtagatctgcccccagtcgagtcggctcgcgagatccggtaatcccagattcaactgccgcggtggacgatcgccggtgatcaacaaccgtgttttgccgctttccagaattcgattgtagagatcgaaaatcgccatctcccacaactcatcgcctgcaatacactcaatgttgtcgatacagaccaggctcaaatgctccataccgtcgagcacttccggaacaaaccaggtgcgtttatccagcgggacatagcccaccgcatcgccacgctggctcaattccgcgcaagccgcgtgcagcagatggctgcgccccgcgccttcgcgtgcccagagatagatgtaaccgctatgttcctgacgcagcacgttttgcagcgcggccagtaaagaggagttatcccccggccagaaacttgcaaaggtttcgtcgtcaggaagataaagtggcaaagagagctgtgccggtgtgttcagagatacctcaaccaggatttcacaaaatcggctgaagtttaccacagaatcccatgatgtttgaaccgggcagcaacactgcccggtcggtacattatttgtctgttatatccgcgtcttctgcgtccagcaccacttcttcagggcgcagcacactgatcagtttgaagatcaaacttaagccgataccgacgatggtcgccagcgccataccttttaactccgccgcgccgatgtttaccttcgcgccactgacgccgatgatcaaaatcacggaagtcaggatcaggttctgtgctttgttgtaatccactttgctttcgatcaaaacacgaataccggaagcaccgatgacaccataaagcagcaggctaacgccgcccatcaccggcaatgggatcatctggatagcggcagccagtttaccgacgcaggaaagcaggatagcgaaaatcgccgccccgccgataacccaggtactgtaaacacgggtgatcgccatcacgccaatgttttctccgtaagtagtatttggcgtagagccaaagaagccggaaatcacggtgctcaagccattagcaaacatgctacggtgcagacctggatcgcgcagcagatcttttttgacgatattagccgttactaccaggtgccctacgtgttcggcaataaccactaacgccgctggcagaatagtcagaatggcaaaccactcgaagcgcggcgtatagagggttggcagcgcaaaccagtgagcattaataatcggcgtggtatcgacaattcccattgcgaaagagagcgcgtaccccaccagcacgccaattaaaatcgggataattgccaggaaaccacgaaacagcacggaacctaaaaccgtgaccgccagggtggtaatagagatgatgatggttttggagtctggcgtttgcccttcagccgggagtaaacccgccataccggcagctacgcccgccagctccagaccgatgacggcaacgattgcgcccattgccgcaggtggaaacagcacgtccagccagccggtccccgctttcttcacgataaaagaaaccaggcagaacagcacgccgcacataataaagccgcccagcgcgacttcataccctaacggcaacagtaacaataccggactaataaaggcaaagctggaaccaagataagccggaattttccctttacagatgaagagatacagcagcgttccaataccgttaaataacagtacagtcgccgggttaatatgaaataagacgggcaccaggacggttgcaccaaacatggcgaacaaatgttgcaaactaagcgggattgtctgtaaaagtggcggtctttcactcaccccgatagcacggcgcgtcatagtattatcctctgtattatgtgttataggcgctttactcaaaaaaaagccgactcttaaagtcggctttaattatttttattctttatttcgtaccaaagattttgtcaccggcatcgccgaggcccggaataatgtatccgtgctcgttcagtccctgatcaatgcttgcggtatacagttcgacgtccgggtgcgctttttccagcgcagcgataccttctggcgcagctaccagcaccagaactttgatgctgctgcagcccgcttttttcagcaggtcgatggtcgcgataacggaaccaccggttgccagcattgggtcaacgatcagcgccatacgctcatcgatgttagaaaccagtttctggaagtacggtaccggctccagcgtttcttcattacggtacataccgacaacgctgatgcgcgcgctcggaacgttttccagcacaccgtccatcataccaagacccgcacgcagaattggcacaacggtaattttcttacctttgatctggtcgatttctaccgggccgttccagccttcgatagttactttttccgtttcgaggtcggcggtcgcttcgtaagtcagcaggctacccacttcggaagcgagttcgcgaaagcgcttggtgctgatatcttgctcacgcatcagtcccagcttgtgtttgacgagtgggtgtttgacttccacgatcttcatactctttctcctttgaggggcagccacaaaaaaaatcgacggattatacctcctttcttcaaggcggcaatattcttttcgttgactttagtcaaaatgataacggtttgagataaagttattttatattcagatggttatgaaagaagattattccatccgaaaactaacctttaccctggcacaagtcttctttcgccgcgcgcctggggaaaagacgtgcaaaaaggttgtgtaaagcagtctcgcaaacgtttgctttccctgttagaattgcgccgaattttatttttctaccgcaagtaacgcgtggggacccaagcagtgaccgataaaacctctcttagctacaaagatgccggtgttgatattgacgcgggtaatgctctggttggaagaatcaaaggcgtagtgaagaaaacgcgtcgtccggaagtgatgggcggtctgggcggcttcggtgcgctgtgtgcattgccgcaaaaatatcgtgaacccgtgctggtttctggcactgacggcgtaggtaccaagctgcgtctggcaatggacttaaaacgtcacgacaccattggtattgatctggtcgccatgtgcgttaatgacctggtggtgcaaggtgcagagccgctgtttttcctcgactattacgcaaccggaaaactggatgttgataccgctagtgcggtgatcagcggcattgcggaaggttgtctgcaaagtggctgtagtctggtgggtggcgaaacggcagaaatgccggggatgtatcacggtgaggattacgatgtcgcgggtttctgcgttggcgtggtagaaaaaagtgaaatcatcgacggctctaaagtcagcgacggcgatgtgctgattgcactcggttccagcggtccacacagcaacggctatagcctggtgcgcaaaattcttgaagtcagcggttgtgatccgcaaaccaccgaacttgatggtaagccattagccgatcatctgctggcaccgacccgcatttacgtgaagagtgtgctggagttgattgaaaaggtcgatgtgcatgccattgcgcacctgaccggcggcggcttctgggaaaacattccgcgcgtattgccagataatactcaggcagtgattgatgaatcttcctggcagtggccggaagtgttcaactggctgcaaacggcaggtaacgttgagcaccatgaaatgtatcgcaccttcaactgcggcgtcgggatgattattgccctgcctgctccggaagtggacaaagccctcgccctgctcaatgccaacggtgaaaacgcgtggaaaatcggtatcatcaaagcctctgattccgaacaacgcgtggttatcgaataatgaatattgtggtgcttatttccggcaacggaagtaatttacaggcaattattgacgcctgtaaaaccaacaaaattaaaggcaccgtacgggcagttttcagcaataaggccgacgcgttcggccttgaacgcgcccgccaggcgggtattgcaacgcatacgctcatcgccagcgcgtttgacagtcgtgaagcctatgaccgggagttgattcatgaaatcgacatgtacgcacccgatgtggtcgtgctggctggttttatgcgcattctcagcccggcgtttgtctcccactatgccgggcgtttgctgaacattcacccttctctgctgccgaaatatcccggattacacacccatcgtcaggcgctggaaaatggcgatgaagagcacggtacaagcgtgcatttcgtcaccgatgaactggacggtggcccggttattttacaggcgaaagtcccggtatttgctggtgatagcgaagatgacatcacagcccgcgtgcaaacccaggaacacgccatttatccactggtgattagctggtttgccgatggtcgtctgaaaatgcacgaaaacgccgcgtggctggatggtcaacgtctgccgccgcagggctacgctgccgacgagtaatacccccgtaattaaagcgccagctctgccgctggcgtttttcaattcacctgtaaatcgcaagctccagcagtttttttcccccttttctggcatagttggacatctgccaatattgctcgccataatatccaggcagtgtcccgtgaataaaacggagtaaaagtggtaatgggtcaggaaaagctatacatcgaaaaagagctcagttggttaagcttcaatgaacgcgtgcttcaggaagcggcggacaaatctaacccgctgattgaaaggatgcgtttcctggggatctattccaataaccttgatgagttctataaagtccgcttcgctgaactgaagcgacgcatcattattagcgaagaacaaggctccaactctcattcccgccatttactgggcaaaattcagtcccgggtgctgaaagccgatcaggaattcgacggcctctacaacgagctattgctggagatggcgcgcaaccagatcttcctgattaatgaacgccagctctccgtcaatcaacaaaactggctgcgtcattattttaagcagtatctgcgtcagcacattacgccgattttaatcaatcctgacactgacttagtgcagttcctgaaagatgattacacctatctggcggtggaaattatccgtggcgataccatccgttacgcgctgctggagatcccaagtgataaagtgccgcgctttgtgaatttaccgccagaagcgccgcgtcgacgcaagccgatgattcttctggataacattctgcgttactgccttgatgatattttcaaaggcttctttgattatgacgcgctgaatgcctatagtatgaagatgacccgcgatgccgaatacgatttagtgcatgagatggaagccagcctgatggagttgatgtcttccagtctcaagcagcgtttaactgctgagccggtgcgttttgtttatcagcgcgatatgcccaatgcgctggttgaagtgttacgcgaaaaactgactatttcccgctacgactccatcgtccccggcggtcgttatcataattttaaagactttattaatttccccaatgtcggcaaagccaatctggtgaacaaaccactgccgcgtttacgccatatttggtttgataaagcccagttccgcaatggttttgatgccattcgcgaacgcgatgtgttgctctattatccttatcacacctttgagcatgtgctggaactgctgcgtcaggctagcttcgacccgagcgtactggcgattaaaattaacatttaccgcgtggcgaaagatagtcgcatcatcgacagcatgatccacgccgcacataacggtaagaaagtcaccgtggtggttgagttacaggcgcgtttcgacgaagaagccaacattcactgggcgaagcgcctgaccgaagcaggcgtgcacgttatcttctctgcgccggggctgaaaattcacgccaaactgttcctgattagtcgtaaagaaaacggtgaagtggtgcgttatgcacacatcgggaccgggaactttaacgaaaaaaccgcgcgtctttatactgactatagcttgctgaccgccgatgcgcgcatcaccaacgaagtacggcgggtatttaactttattgaaaacccataccgtccggtgacatttgattatttaatggtaagcccgcaaaactcccgccgcctattgtatgaaatggtggaccgcgagatcgccaacgcgcagcaagggctgcccagtggtatcaccctgaagctaaataaccttgtcgataaaggcctggttgatcgtctgtatgcggcctccagctccggcgtaccggttaatctgctggttcgcggaatgtgtagcctgatccccaatctggaaggcattagcgacaacattcgtgccatcagtattgttgaccgttaccttgaacatgaccgggtttatatttttgaaaatggcggcgataaaaaggtctacctttcttccgccgactggatgacgcgcaatattgattatcgtattgaagtggcgacgccgctgctcgatccgcgcctgaagcagcgggtactggacatcatcgacatattgttcagcgatacggtcaaagcacgttatatcgataaagaactcagtaatcgctacgttccccgcggcaatcgccgcaaagtacgggcgcagttggcgatttatgactacatcaaaagtctcgaacaacctgaataaccctatgccaatacacgataaatcccctcgtccgcaggagtttgctgcggtcgatcttggtagtaacagttttcacatggtcatagcccgtgtggtagatggtgccatgcagattattggccgcctgaaacagcgggtgcatctggcggacggcctggggccagataatatgttgagtgaagaggcaatgacgcgcggtttaaactgtctgagcctgtttgccgaacggctacaagggttttctcctgccagcgtctgtatagttggtacccatacgctgcgtcaggcgctgaacgccactgactttctgaaacgcgcggaaaaggtcattccctacccgattgaaattatttccggtaatgaagaagcccgtctgatttttatgggcgtggaacatacccaaccggaaaaaggtcgcaaactggttattgatattggcggcggatctacggaactggtgattggtgaaaatttcgaacctattctcgttgaaagccgccggatgggttgtgtcagctttgcccagctttattttcctggcggggtcatcaataaagagaattttcagcgcgctcgcatggcggcagcacaaaaactggaaactttaacctggcaattccgtattcagggctggaacgttgcaatgggcgcttccggtaccataaaagccgcccatgaagtgttaatggaaatgggcgagaaagacgggataattaccccggaacgtctggaaaaactggtaaaagaagttttacgtcaccgtaatttcgcaagcctgagtttaccgggtctttccgaagagcggaaaacagtcttcgttccgggactggcgattttatgcggtgtgtttgatgctttagccatccgtgaactgcgcctttctgacggggcgttacgcgaaggcgtactgtatgaaatggaaggacgtttccgtcatcaggatgtgcgtagtcgcaccgccagcagcctcgccaaccagtatcacatcgacagcgaacaggcccgacgggtgctggataccactatgcaaatgtacgaacagtggcgggaacagcaaccgaagctggcgcatccgcaactggaggcgctactgcgatgggccgccatgctgcatgaggtcgggttgaatatcaaccacagcggtttgcatcgccactccgcttatattctgcaaaacagtgacttgccgggttttaatcaggaacagcagctgatgatggcgacactggtgcgctatcaccgtaaagcgattaagctcgacgatctaccgcgctttaccttgtttaagaagaaacagttcctgccactgatacagctattgcgccttggcgtattactcaacaatcaacgtcaggcaaccaccacaccgccaacattgacgctgattactgatgacagtcactggacactgcgtttcccgcatgactggtttagtcagaatgcgctggtactgcttgatctggaaaaggagcaagaatactgggaaggcgtggctggctggcggttgaaaattgaagaagaaagtacaccagaaatcgccgcttaatactttgcgggccgacgagaaatgtcggcccgcattattcaggcactttcgcgaatgggttcgatttcattcagcgtatcaattaacggctgcggcttaccaataagataaccctgcatataatcgatccccaaagagagcaccgcctcgcggatctcttcgttttcaacgtactctgccactaccagcattttcttcattcgcgccaggtggcaaatgcttgccactatctgataatccagactattactcacaatattgcggataaaactgccgtcaattttaagcagatcggcattcacatttttaagccgcgcatagctggcgtagccggtgccgaaatcatcaatcgcaatctggcagcctaattcctgaagatgctgcaaggtgatttgcgcctgcttaacattggtcagagcattactttcggtgacttcaaaaataagttgccacgcttcaatctgatatttagccagcaactgactgacttcaacaggaaaacgagcctgacatacgctggttggagacagattaatagcaaaacggtgagcgggcatcttcgctctgttttcagccataaattgcagcgtatgctcaatgacccacatgtcgatactgctgcttaaaccaaattcgtgcgcgaccggcaagaagctatcggggctgatcagttcatcattctcacctttcatgcgcagaagaatttcatggtaaacatcaccacgcataccggtaatcggctgggccatcaggaaaaaatggttgtgttccagcgcctgctgtagtcgattcatcatcgcgactttatctttcaattcgcgttgcaaatacattgccccgcgacgctgcatattttccggggcgttggtcacgatggaaagttcggcgaccgtatttagctctcccagcagcaggtagatatgattcactgggctgcgcacatagcagtaactgacgccaatctgcggttgcatcggcatgccatcccaaaagaaacgaaattgcttgagatggctatccagtgcggtaatgcgctcctggtggctttctgtattcagtcgcagcgcgagatcgttaccgctaagctgataaacatcttcacccggttccagcaagggactcagccagtgagaaagtttttgcttgtattgaatccgcagcatgatgccatagttcttaaccagcatttccatgccagggatgcgtaaataacaaagcgcagaccagggggcatcacgcaacgcgcgattcagggcgcgaacatttggcagatgaaccaccgggtccacatacgcaagccgctgaatgcgtctgactaccgctctctgacgggttgccagtacagccatataattgacaataaaagagaataccagataactggaggaggttatggtcagctgcgtggtatagccaggataaatgggaatgtaattttgatagctgtggatgctgatcatcaacacgaccgcccagagcaggctaatcagcttataaccatagcgcatcgctccccacatcatcaggggcagcaataaactcaaggtataattggtgctaaaaattgtgcttttttcatttaacggcatgcataacagcaacaataaagcacctaatgccagtagccagagcgcgaactcttttttggtgactttggcatcaacctgctgttttaattggctataatagctacgtaaataaaatggatttcgcactacccgaatgatgaagtagcacagcgggacaccgatcagattacccaccagtaaggcctgataattgattaaagtcccgaggttaaaaggcatgacaccgaccagattttctctgctcgccagtaatcctacaaatgcagcaaactggaaaagtatcagaaacagcgttgcaggaaacacaatctgccagaatatacgctgggaaattaaacgggtatcaccatgactaacgttgttacgccggggagtaaagaccctgtaaccgccccaacagagaatgataatgataataaaattagccgttaaacttagcgtttcgtaaaaacccagctctgcatatttgcggacaaaaatccctaaggcgatccctggcaatgccgcccagctgaaaaacatcatcatgctgatcatcagtgccagaggcagataaaagagaaaaacctcaccggaagaaatatgcgcgaaagtattaatgtgggcgaaaatgggcaagattaaagaaggcaggaacagcggaagcccccaccatttatcacgtatttttatataagttgcattcagtttcatagatgctcagcagaatcccccacatcctgaaggaggtgtattcagacaggcatcccacctgacttcgaatgatgattattcatcactatagagagcattgattctaagtgtcatatgaaagtaccaattgatatatatcaaacaaaataaccctgattaatgaattattacgtttatcatgttaattcatcattattacatcatcattgtaaataattaaattaacttccataacattaaaatatgtatccactgacgcttttttacataacgaagaattgaccattttgtcctgttgtgccttaatgtaagtaccgtccacagcgtgggacatacttcaaggaaccttttgtgagtcaggcaaccagtatgcgaaaacgacaccgatttaacagtcgcatgacccgtatcgtactgctcatcagctttatcttcttctttggccgttttatctacagctccgtcggtgcctggcagcaccatcagagcaaaaaagaagctcagcaatccacactctccgtcgaaagtccggtacaacgttaacggttaccttctccactttcacagaacataacggcacttcgctgtcggatgcttttgctgtttgggattatcaaagcggcagatattctttcatcttaaattttacgtctttatcctgactgatgtttatcctgtttggctgcgaaataaatataaaattaatatatatgttgtaatgatatatttttataaattattccctgcgtgaattttaataaatttaatctatccctttatacgcaatacatttactttcctcttttgatgatcttaaatgtcttatttttcgtaatgtgtataacaaggaatagtgatgaaatttaaaaaatgtcttctgcctgtggcaatgttagcgagtttcactctggcaggatgccagagtaatgctgacgatcatgctgccgatgtttatcaaaccgatcaactgaataccaaacaagaaactaaaaccgttaatattatttccattcttcccgcaaaagttgccgtagacaactcccaaaataaacggaacgcacaagccttcggcgcgcttattggcgcagtcgctggcggtgttatcggccacaacgtcgggtctggcagcaattccggaacgacggcaggtgcagttggcggcggagctgtaggcgcggcagcgggttctatggtgaatgataaaaccttagtggaaggtgtttctttaacctataaggaaggcaccaaagtgtatacctctacccaggtgggtaaagagtgccagtttacgacaggtttagccgttgttattaccacgacgtataacgaaacgcgtattcagccaaataccaaatgtcctgaaaagagctaataatcaggaggagtcatgaagaaagtttttctttgcgccatcttagcctccttaagctatccggctatcgccagtagtttgcaggatcaactctctgctgtcgcagaagcggaacagcaaggtaaaaatgaagagcaaaggcagcatgacgaatgggtcgcggagcgcaacagggaaatccagcaagagaagcaacgtcgcgcaaatgcccaggccgccgctaacaaaagagcggcaacggcagcggcaaataagaaagctcgtcaggataaactggacgccgaagcctctgcggacaaaaaacgcgatcaaagttatgaagatgagctacgcagcttagagattcagaaacaaaaactggcgctggcgaaagaagaagcccgcgttaagcgagaaaacgaatttatcgatcaggaactgaagcacaaagctgcgcaaaccgatgtggtgcaatctgaagctgacgccaacagaaatatgactgaaggcggtcgcgatctgatgaaaagcgtgggcaaagcagaagagaacaaaagcgacagctggtttaattaatcgatgttagtaacttcaatcctataattcttgaagataaaaaaccctctgtagtaacagagggttttgttcattcatagtgcagggtcaaatcattcccactcaatggtagctggcggcttgccgctgatgtcatacaccacgcgggaaataccgttcacttcattgataatgcggttggaaacgcgaccgaggaaatcgtacggcagatgcgcccagtgtgcggtcataaagtcgatggtttcgacagcacgcagagagacaacccagtcatacttacgaccatcgcccattacgccaacggaacgtaccggcaggaacacagtgaacgcctggctgactttgtcgtacaggtccgctttacgcagttcttcaatgaagatggcgtcagcacggcgcagcaggtcacagtactctttcttcacttcacccagaacacgaacgccaaggcctggtcccgggaacgggtgacggtacagcatgtcgtacggcaggcccagctccagaccaatcttacgcacttcgtctttgaacagctctttcagcggttcaaccaggcccatcttcatctctttcggcaggccgcccacgttgtggtgagatttgatgacgtgtgctttaccggttgcagacgccgcagattcgataacgtcagggtagatggtgccctgcgccagccacttcacgtcttccagtttcagcgcttcttcatcgaatacttcaacgaaaacgcgaccgatgattttacgttttgcttccggatcgttttcgccagccagcgcactcaggaagcgatcttctgccggtacgtgaacaatgttaagaccaaagtgatcgccaaacatatccagaacctgctctgcttcgttgaggcgcagcaggccgttgtcgacgaatacgcaagtcaggtttttaccgatagcgcggtgcagcagcattgcggttacggaggaatccacaccaccagagaggccgaggatgactttatcgtcgcctacctgctcgcggatgcgagctacagcatcgtcgataattttcgctggcgtccacagggcttcacactggcagatatcacgcacaaaacgctccagcatgcgcataccctggcgggtatgagtcacttccgggtggaactgtacgccatagaagcgtttttcttcgttagccataatggcaaacgggcagctttcggtgctggctacggtgatgaagtcggacggaatagcggtaactttatcgccgtggctcatccagacatcgagcagcggtttaccgtctgcggtcagcgcatcttcgataccgcgaaccagtgcgctgtcgtttacgacttcaacctgcgcgtagccaaattcacgttcgttagaggcttcaacgtgaccgcccaactgcattgccatggtctgcatgccatagcaaacgccgaataccggtacgcctgcttcaaagacatactgcggcgcacgcggactgttttcttcagtagtactttccgggccgccggaaagaataatgccgcttggattgaagtcacgaatttgtgcttctgtcacatcccacgcccacagttcgcagtaaacacccagctcacgcacgcggcgcgcaaccagttgagtgtactgagaaccgaagtccagaatgaggatgcgatgcttatgaatgttttccgtcattgacgcttattccgaggcaagtgaaacagataatataaatcgcccgacatgaagtcgggcgaagagaatcaggagcccagacggtagttcggggactctttagtaatggtcacgtcgtgaacgtggctttcctgaatgcccgcaccgctgatacgtacaaactccgctttagtacgcagttcgtcgatagtaccacagccggtcagacccatacaggagcgcaggccgcccatctgctggtgaatgatctctttcaggcgacctttataggctacgcgaccttcgataccttccggcaccagtttgtcggcagcgttatcgctctggaaataacggtcagaggaacctttggacatcgcgcccagggaacccataccacggtaagatttgtaagaacggccctggtagagttcgatttcacccggagattcttcagtacccgccagcatggaacctaccatcaccgcgcttgcgccagcggcgatagctttggcgatgtcgccggagaagcgaataccgccatcagcgataaccggaataccggtgccttccagggcttctactgcgtcagcaacagcggtaatctgcggaacaccgacgccagtcacgatacgagttgtacagatagagccagggccaatgccgactttaaccgcactgcaaccagcttctgccagagcgcgtgcacctgcagctgttgccacgttgccgccgataatttgcagatccggatatttagcacgggtttcacggatacgttgcagtacaccttcactgtgaccgtgggaggagtcgatcagcagaacgtcaacgcctgcggcaaccagcgcgtcaacacgctcttcgttacccgcacctgcgccaaccgctgcaccaacacgcagacggccttgctcgtctttacaggcgttcggtttacgttccgctttctggaagtctttcacggtgatcatgccgatcaggtggaattcgtcatcaaccaccagcgctttttcaacgcgtttttcgtgcatttttgccagcaccacttcacgggcttcaccttcacgcacggtgaccagacgctctttcggcgtcatgtaaacgctaaccggctggttcaggtcggtaacaaaacgcacgtcacgaccggtgataatacccaccagttcgttttcttcggtaacgaccggatagcccgcaaaaccgttacgctcggtcagttctttcacttcgcgcagcgtcgtggttggcagaacagtctgcggatcagtcaccacaccagattcgtgttttttcacacggcgaacttcttctgcctggcgttcaatggacatgtttttgtggataaagccgataccgccttcctgagccagagcaatagccaggcgcgcttccgttacggtatccattgctgcggaaagcatagggatattcagacgaatagttttcgtcagctgggtgctgaggtcagcagtattcggcagaacggtagagtgagcaggaacgaggagaacgtcgtcaaacgtcagagcttctttagcgatacgtagcatgggcaatatctcgaccagagtggttaataaatattgccgcggcattatacagagcgtaaccgattgcatctacccctttttgcaaaaaatgcttgctatccccgaagggcgggttactatcgactgaataacctgctgatttagaatttgatctcgctcacatgttaccttctcaatcccctgcaatttttaccgttagtcgcctgaatcaaacggttcgtctgctgcttgagcatgagatgggacaggtttggatcagcggcgaaatttctaatttcacgcaaccagcttccggtcactggtactttacactcaaagacgacaccgcccaggtacgctgcgcgatgttccgcaacagcaaccgccgggtgaccttccgcccatagcatgggcaacaagttttagttcgcgccaatattacgctctacgagccgcgcggcgactaccagataatcgttgagagtatgcagccggccggtgaagggctgctgcaacagaagtacgaacagctcaaagcgaagttgcaggctgaaggtttgttcgatcagcaatacaaaaaaccacttccctcccctgcgcattgcgttggtgtgatcaccagtaaaaccggtgctgcgctacatgatattttgcatgtgttaaaacgtcgcgatccttctctgccggtgatcatctaccctgccgccgttcagggcgatgacgcgccggggcaaattgttcgcgccattgaactggcgaatcagcgcaatgagtgcgacgtattgatcgtcgggcgcggcggcggtagcctggaagatttatggagttttaacgacgaacgcgtagcgcgggcgatttttaccagccgcattccggttgtcagcgccgtcgggcatgagacggatgtgaccattgccgattttgttgccgatctgcgtgcgccaacgccgtctgccgccgctgaagtagtgagccgtaatcagcaagagttactgcgccaggtgcaaagcacccgtcaacggctggagatggcgatggattattatctcgccaaccgcacacgtcgctttacgcaaattcatcaccgattacagcaacagcatccgcagctccggctggcacgccagcaaaccatgcttgagcgcctgcaaaagcgaatgagctttgcgctggaaaatcaacttaagcgtaccgggcaacagcagcagcggttaacacagcggctgaatcagcaaaatccacagccgaagattcatcgcgcgcaaacgcgcattcagcaactggaatatcgtttagcagaaaccctgcgcgcacagcttagcgccacgcgtgaacgtttcggtaatgcagtaacgcacctcgaagccgtaagcccactgagtacgctggcgcgtggatacagcgttactactgctactgacggcaatgtactgaaaaaagtgaagcaagttaaagcgggtgaaatgctaaccacacgtctggaagacggctggatagaaagtgaagtaaaaaacatccagccagtaaaaaaaagccgtaaaaaggtgcattaagccagcacgaattcaacgcgttttttgcttatcaagccatgcccgtgctgacagaagtaatctactgcaccacaggcttttaacacctgcaacggttgatggcagtctggacaaagagctttcatttcaataaattccccgcaggatcggcaacgcgcatggccgttatcctgatcaagcacatgctgacattgtggacaatgcagttccatatgaattcctccggtagccattccctctacattcatagagggaatggcagataaaatacttacggataattatttatttttcttgatgtgcttcatcagacgcttacgtttacgcatctgggttggcgtcagggtgttacgcttattcgcatacgggttttccccttctttgaactgaatacgaatcgggcttcccattacgtccaggcttttgcggaagtagttcatcaagtagcgcttgtaggaatcaggcaggtctttcacctgattaccgtgaatcaccacaatcggcgggttataaccaccggcgtgggcatatttcagcttcacacgacgaccgcgtaccagcggcggttggtgatcttcaacagccatcgtcatgatgcgcgtcagcatagaggtccccacacgacgggtggagctgtcatacgcttcacgtacactttcaaacaagttaccaacaccactgccgtgcaaggcagagataaagtgcacacgagcaaaatcgataaagcccagacggaagtccagcgtttctttcacctgctctttcacttcctgactcaggccatcccacttattcaccacaatgacaagactgcgcccactattgagaataaagcccagcaggctgagatcctgatcggaaataccttcgcgcgcatcaatcactaacatcaccacgttggcgtcttcaatggcctgcaacgttttgattacggagaatttctctacagcatcggtgattttgccgcgtttacgtacgccagcggtgtcaatgagcacatactcacgtccatcgcgttccattgggatgtagatgctgtcacgcgtcgtgccaggcatgtcgtaaacaacaacgcgctcttcaccaagaatacggttagtgagtgtagacttacctacgttcggacgacccacaatcgccagtttgatcggcagactttgcgggtcgaagtcgtcttcctcttcttcttcgccgttctcttccgcttcaaattgcgcccagtattcagcgtcttcgtcgacttcctcttgcggtgcgagatcttccatccacggcagcagcacatgctccagcagacttaatacgccacgaccgtgagacgcggcgatcgggtagatttcacctaaaccaaggctgtagaaatcaaccactgcctgatcgggatccagaccgtcagttttgtttgccaccaggaaggtcggtttttcacgggagcgcagatgtttggcaatcgcttcatctgccggcatcaggcccgcgcgcgcatccaccataaacagtacgacgtccgcttcttcaatcgccagcaggctttgttccgccatgcgggtttctacaccgtcttctgtgccatcaatcccgccggtatcaatacagataaactcacggccttcaatttccgcacgaccgtacttacggtcacgagtcagacccgggaaatccgcaaccagcgcatctcgggtgcgagttagacggttaaataacgtggattttcctacgttagggcgcccgacaagcgcgaccacaggtaccatgtttaaagcctcatttttataaatcatcagacaacgcacgctatattcgcgtcgttgttaaaaacaggaaaacggcccctgtccaggagccgttttcaaagtgaacgacagagacgattaacgtgtaatagagtacacggttccgtcttttgcctggatcagcagtttgccgtcagcggcaaccggttcagtctggaaaccggaactatcaactttttgctgggcaacgaaacgaccatcttcgacgttaatccagtgcagataaccttcactgtcaccgaccaccaggttgccattatacagcaccggagaagtcagcaggcgatgcagcagatcgctttgtgtccacagcgtaacgccgccatcaatggtcaacgccatcacccggtcattttgatcgaccagatagatgcgattgccgtcgacgatgaaatcattcacgctacccagttcgcgtttccacataatctgaccactgcgcagatcaagcgccgtcaggttaccattataggccagcgcgaaaacaacgccgttaacaacgacgggagtcgtgtcaacatcgctcagacggtcaatttcggtagaaccggtcgcctgggaaatacgctgctgccaaatcatctggccctgttccatcagcactgcgctgacgcgaccattatcgccccccacgacggccgcaccaaaagccgttgtcggcgcagactcgccacgcaaagagaggctaggcatatcgaggttaactgtccatttgacagcgccgtcagcttcgttcagcgcttgtaactgaccgttactggtgtggattaacaccagaccgtcgctgaccaccgggcggctaagtgcttcacccgcgactttagtttgccatgccacagtaccatcgctggtattcagcgcgtaaacctgcgccttttcgctgccaatgtagacatgcccaccagacacggtcacaccgccagaaagtaatgcaggctctttagagaaccagccatctttctcggccaggctgacagaccagatttctttgccatcatccgcattcagcgcttttactaaaccagcgcggtccgctgcatagacaacgttgtccgccagtgccggatgaagattggaatagaagttgccaatgccgctaccaacggaagtgctccacgccgtggtcggcgtaaactggttttcaacggttggcaatggggacatctttaccacatcttcttcgctgttaaacaggctacagccgcttaaaagggtaacggaaagcagtcctggcagcagtaatttacgcaattgcatcgggtccctctcagatggacaaattattaattttcatctgcatcatttcgctcagtgccggagtaacatcgcttttcacgcctgcttcccatgcactacgcgcaccttgcttatcacctttgctcagcaatgcttcaccacgcaggtcggcaacaatggcagcccacccttcacctttgatggtatcaagggttttcagcgcggcatcagcctgcttgagctgtacctgaacgcgagcaagacgcagatttatcacggctttgagattttcatcgctcgtgtctgccagcccctgttgtaactgggcggcagctttctctagttcatttttgtcaacaaattgctgcgcaagttccaaagaagccagcgcaccataagtatttttattttcagcagcaaatttttccgccgccgggatgctatccggtttgccttcgctcactgcggtaaccgcattttgataggcaagagaagcggagcgtgcagaatcaacctgatggctgttccagtagcgccagccaatcagtgcgccaacgcccaaaatcaccccaacagccagtgctttgccattttcagcaaaaaagcgtttaaccgcttctacctggtcgttttcgttctcgtaaatttccacgctgtccttctccttccttaacccagtaacgtgcgcaaatgcgcggctacgctatcctgcgcaactgccgtttgctcaccagagcgcaaatccttcactactgctgtgccgttagccacttcagactcacccagcaccacagcaacgcgggcaccccatttatcagcacgggcaaactgtttcttaaagttgccgccgccgtggttggtcatcaatttcacgcccggtaattcatcacgcagacgctcagctaatgccatagccgcagattgtgtatcagcaccactagccaccaggtatatatcgacaacaggatcggctttaaattccggattaacggcctgtactaacaatacaagacgttcgaggcccatagcaaaaccgacagccggtgttgcacgaccgcccagttgttccacaagaccgtcataacgaccgcctgcacacacggtgccctgggagccgagactgttagtcacccactcgaaaacggtacggttgtagtaatccagaccacgcaccagacgctggtttacggtgtaagcgatccccgcgctctccagcagtttgcacagaccggcaaaatgctcacgagattcctcgtccagatagtcacctaatgccggagcgtcgttgagaagcgcctgcacttccggatttttactatccagcacgcgcagcgggttagtgtacatgcggcgtttgcagtcttcgtccagcttttctttatgctgctcaaggaatgccaccagcgcatcgcggtaattggcgcgtgcttccaggctaccgatagagttcagctcaagagttacgtgctcggaaatacccagcgcgcgccaccagcgggcagtgagcataatcagttcagcgtcgatatccggaccttgcagaccgaaaacttcgcagcccaactgatggaactgacgataacgccctttctgcggacgctcgtgacggaacatcggcccgatataccacagacgctgttcctgattgtacagaagaccatgctcgatgccggcgcgtacacagcccgccgtcccttcagggcgcagagtcaggctgtcgccattgcgatcctcaaaggtgtacatctctttttcaaccacgtcggtgacttcaccaatcgcacgtttgaatagcggggtctgctctacaatcggcaagcggatttcactgtaaccgtagctgccgagcacgtttttcagtgtgccttcaatgcgctgccagatggccgtttcgccaggcaggtaatcgttcatgccgcgaatggcttgaatgttttttgccacgtttattctctttctgaatataaaaatgaaccctcaacgcttccctcaatgtttcgggagccatgcgggttcaatcatacacgggaagcgaggcgcttcccatcacgttattatttttcaacctgctgaacgtcaattcgacgcgcttcgtccagctgactggctttcgcacgaatgcgtgcttccagctggtcgatcatatcgttgttgtccagacggtctttgcgcacgccatcttcatagaggccgcttttcttgttgccgccggtgacgccgagtgtagaaaccagcgcctcacctgggccattcaccacgcagccgataatgctaacgtccatcggagtgatgatatcttccaggcgttgctccagcgcgttaaccgtaccgataacatcaaattcctgacggctacaggtcgggcaggcgatgaagttgatccctcggctacggatacgcaggcttttcaaaatatcgaaaccgactttgatctcttcgaccggatcggccgccaggcttacgcgcagcgtgtcgccgatgccttcagacagcagcagacctaaaccaatggcggattttactgccccgctgcgcgcaccaccggcttcggtgatccccagatgcaacggctgatcgatctgttttgccagcaaacgataagactcaacagcgaggaagacgtcagacgctttcacgctgactttgaactgatcgaagttcaggcgatcgagatgatcaacatgacgcatggcagattccagcaacgcctgcggcgtcggttcgccatacttttcttgcagatctttttccaggcttccggcgttaacgccaatacggatcggaatgtttttatcgcgcgcacagtcaaccaccatgcgaatacgctcttcattaccgatattgccagggttaatacgcagacaatcgacgccgtattccgctactttcagcgcaatgcgatagtcgaagtggatgtcagccaccagcggcacgttaacctgctgtttgatgagtttgaacgcttctgccgcgtccatcgtcggtacggatacacggacgatatcagcgccaacgcgttccagcgccttgatttgattgaccgttgcttcgacgtctgtcgtacgcgtattggtcatggactgtacggcgatgggagcaccatcgccaatcggcacattcccaacgtaaatacgtgtactttttctacgttgaattggagcctggttatgcatgaaaaatctcccgcgttacccgtctgttactgcgccggactttgttcggcattgagggtcagacgcgcaacctggttagttctgataaaacgactcagatcgacaggtttcccttgatactggatctgtactgcggctggcgcaccaattttcagtttgtacggtgcctggccggttaagttcaaattaccgtctttacgctgcataccgctaaacaattttttaccggtagcatcagtgacctccagccagcaatcggcagtaaagttcatcaccagcgcattcggatcagccaccggcgtggtcacgccagcctgatcggttggcaacggcgcagcaccatctggcgttgttgctgccgttggtgccggggtcgcggcggtatcaacatttgcctggctagggctaacaaccgcattctgttgcggatcaacagctggtgctggcgcagttacggcaggtgtttgcgtgttggttgcggtagtatccacagacgctggcggcgtggacgttgtagccgggtctgtagttgtgctcgtatttaatggaacactctgcccctgctcgctattactgctcagttccgcgctagattgatcggccatagtggtgatctcttcctgctgagctttgcggtcttgccaccaccaggcaccgctcaggccgataaccacaaacaacaccagccaagtgaaggtcatcagccagccgtcgcgttttttgcggcgtttaccgagggaaaaactctgcatcggcgcaacttttgcagcccgaagtggagcctgcttttccagccctggcagcagttcttcttctggaatatgtaccagacgcgcataagagcggatatatccgcgcaggaatgtactagcaagatcggcgggtgccttatcttcttcaatgtcgcgtaccgtggaaaccttcaggcaaagtcgctcggcaacggcctgctgactaagtcctagttgttcgcgagcattacgcaggcgagcgccggtagtaagtgcttcattttggtcgtgcgtggcttcagtattcattcgctgcaggtacgtttaaatgagaattgagatgccggtgaaccatcatgctcacccacaccgcgaaacatccgttaagttaaccgttatcatacagtataagaccgtctgtgtgctcgtgacaaagcccacattcactaaggctaacttactgttgcatcgttacatactgccttaaagtcagcaaaaacgcaccgttaatattgaccagacaattgcaacttaatacttcattcataaaacattacgccacggtacataaagtaaccgtggcgtaatggctatcagaccgctttaatgtcgatggcttcaccctgcatccgtttacgcagggtacgtttcgtacggtcgataacatcgcccgccaactgaccacaggcagcatcgatatcatcaccacgagttttacgcacaatagtggtgaaaccgtagctcatcagcactttactgaaacggtcgatacggctgttgctgctgcgtccatacggcgcacccgggaacgggttccacgggatcaggttgatcttacacggcgtatctttcagcagttccgccagttggtgcgcgtgttcagtgccgtcgttaacgtggtcaagcatcacgtattcaatagtgactcggccctgattggcgttggatttctccagataacggcgcaccgcagcaaggaacgtttcgatattgtactttttgttgatcggcacaatttcgtcacgaatttcgtcgttcggcgcgtgcagggaaattgccagtgcaacgtcgatcatatcgcccagtttatccagcgccggaactacaccggaagtggaaagcgtgacgcgacgtttagacaggccaaaaccgaaatcatcaagcatgatttccatcgccggaacgacgttgttcaggttgagcagcggctcgcccatgcccatcatcactacgttagtgatcggacgctgaccggtgacttttgctgcgccgacgattttcgccgcacgccacacctggccgataatttcgctcacccgcaggttgcggttaaagccctgctgggcggtggaacagaatttacactccagcgcacaccccacctggctagagacgcagagcgtggcacggtcgtcttccgggatatacaccgtttcgacgcgctgatcgccaacggcgatcgcccatttaatggtgccgtcagaactacgctgttcttcaaccacttccggtgcgcggatttccgccacctctttcagtttgccgcgcaacactttgttgatgtcggtcatctcatcaaagttgtcgcagcaatagtgatacatccacttcatcacctgatcggcgcggaagggtttttcacctaaatctttaaaaaactcccgcatctgctgacggttgagatccagcaggttgatttttccatctttcgtggtgacgttttcaggtgtgactaattgttcagacatatgctattccggcctcgttattacacgttatggcccctggagggttgaaaaaagaaacgccccggtgagcggctgctcgtccgggggcgctgcattgtacaaattctggcgcacggatgccacgtttgcacgcggcatttacgaaattattaacgggtgcgcgggcacacttcgccttcgccaaagaaataagcgatttcgcgagcggcagattcgacggaatcagaaccgtgggtaccgttttcggtcaggctgtcagcgtaatcagcgcgcagagtaccagccagtgcgtttgccggattggtcgcgcccagcagatcgcggtgacgctgaacggcgttttcaccttccagcacggaaaccacgatcgggccagaggtcatgaattcaaccagaccatcaaagaacggttttccatcgtgttcagcataaaagccacgtgcctgttcaacggtcaggtgcagcattttggtgccaacaattttgaaccctgcagcttcaaagcgcgcaaagatattaccaatgacgttttttgctaccgcgttcggtttgatgatggaaaaagtacgttcaatagccatttttacctctgtaaattgttctgttgttgtctgtaccagcgtacgagatggcgcggattataatgagcaacagggccgttgactattgatgaaggtaacatttttttaaaataaaatgagttttagcaacaatcagggacaaaacagattattgcatgacaaatttcactgtcgcgatttgccccacgtcatccatcaccagcaattgataatcacctttatccgtcaaatgcagggtcacgttgcgcccgcgttcagttaacggttcgccattcagaaaccaccagcgttcacctgcccctccactactttgcaacggcaaagtcgcttccgctgcgcccggtaaacgtttaataatcgcgccatcgcgaacgcctgtcagctgcagcgggagctgggcatcgtgaccgtatggcgggcaacttgtgctggccggtggtaagcgcacagcgcgacgttcacttgcgggcagccagggttccagcggtagcggccagacatttatcatttcttgtcgcgcttgcgggcaatcagcggcaacacgtttgccattttcatccagccagatggggaaacgaatgccattaatgccttcctgctccggcagtaatagagttggcggctgactcccgtccagcagccaggttgccaggcggcggcgacagttaccgtcaccttccggcaaagactgtccgcccggccagcagataacgccacgagtgacactgttcgggcgcgggtcttccggcagattcgcactgcggctcagtaagatattattgacctgattcaacaatggtacggcactggcaaagccaaactgaccaacaacgggcgtgccgtccggtctgccagtccagatcccaatgacatagcgagcgttaaccccaatcgcccaggcgtcacgatagccatagctggtgcccgttttccatgccagtggggcgacgcgcggcaaggcactatccggcaagggttgcgcttcatcagccataatccggcgaatgatccacgccgccccgctgctcattaaaggccgttcaagcagcggatcgtcaggctgtaagcgcaatttgcctgccttgccgtggcgagcaaacgcggtatacgctgccgccatatcttccagttttgcaccagcgccgccgagaatgagactaagattcggcgcagcaccgttgggcaaatataacggcaatccaacattgcgtaactttgccgcaaaccgtttcggtccataggcttccagcacctgcacagcaggtaagttcaggctgcgcaccagcgcctcgctcatgctgatcgggccatgaaaaccgctatcaaagttacctggtcgataatcaccggtgcgccgggggacgtcttgcagcagacttgccgggtggatcaagccttcatccagcgccagaccataaacaaacggtttgagcacacttcctgggcttcggatgctattgaccatatcaacatgaccaaagcgactatcatcgttgagatcaacgcttcccacccagccgcgaacacgcatatcggtatgatcaaccacgatcatcgccagactgctgcgcggtggcaaccgccctttccagttttgcgccagttcttccagacgtcgttgaagaccggcatccaacgtagtagtgattttgtcgcttttgcttttaccgagcatcatgcggctaaacagcggtgccagttgcggcatttgtcggggggccagccagatgggttcttccctactctcttttacctgctcacgggaccacacaccttgcacggccatccgttcgagcactttattacgcgcggcttcggcacgctccggccaacgatccgggcgaagacggctgggcgcttgcggcaaaaccgccagcattgccgcctcggaatagcttaaattcgcagggctttttccgagataagcccaacttgccgcaccgatcccctgcaacgtaccgccaaacggagcgcggttaagatacaaggtcagaatttcacgcttagacagatgccattccagttgcaacgcgcgccagagctggcgaattttgccgccaaatgttttggggtgaggatcaagcagacgagcaacctgcatagtgagcgtgctgccaccggaaataacccgtccgctagtgagatcttgccatgctgcgcgcgccacgctgaatggattcacccccggatgcttccagaaccagcgatcttcataattgatcagcgcttcaaggtaacgtggagaaacatcttcgattgttaccggataacgccagatgccgtcagcatcggcgaagcgccagagcggcgtaccatcctgcgccacgaccactcgtgcgggattgacttcatgcagcggtagaggccagagtttatctgctccccacgctgcaagaaaaaggagaaagggcgcggctgccaacgttatccagcagccgcgtttggttaacaagcgaggcatttacggtctgacaatcagcagatcttcagccgcgccggtcgcccgccattggggaacatacatactttccaccatcggttgcggtacctgatacgttcccggcgtcaccgcccgcgccagatacaccagcgttaccggttggtattcatcaacggcaaccgccgccacaaagcgatcgtcacggaactcaatgtgcttaatgctcgcctgctgcatctggttcagtaagttctgcacttcgccaccactttgctccaggctggcgctaccgttcgccagattctggttttccagttccagacccgcaggcagcagatccacgactaacgcatccggcacgctgttactggcttttacctgcaaccacaccagcaccagatcgccgctacgtaagctgtccaggcttttgctcttaccatcagtaccaagaatatgacgctcgatttgcagcacattgttcgccggtaaaggtgcggattgcggataaccgctggcatccatacgcaaccataacggctgatcgccactgttgctcacctgcaaggtgacaagttgatcgctattcagattgctgttttgcgctttctcgcctgtcagctgctcagcactgaaagaggtttgcgcctgccatttaccgggtaaatcctgaatcgtacgggcagccaggaacaacgcgttactttcctgcgtgcttagccagcgttcaccaaacgcctgctggctaagtgtgttcagcaaagtgtactgctcatcgggtagcagtttattttcttccagcaaggagagcattaacgcgttgtcgcgcagactactaccgtaatcacccagccatatccgctcatcactattacgcggcgttttcagcgccagcgcaatcgcttcttcaccacgcgtcgcatcacccatggttttcagcgcaacgccaagttgcagcagcggtaaaccagaagcggcatctgcacgatgctcccagatttcacgcagcgcacccagcggagccttttgctgacgggccaacaccagcgcagcgtaagactgtacggcgaatttactggctttgagattatccgcgtacgggatgctcatcatgcccggatcttgtaaatagcgcagcagacgctcattaccccggttaatggcgtctgtcggcacgctgtaaccctgttcgcctgcgcggaccaggaaatccatcacgtaagccgtcagccagtactcttcgtcaccgtttttatcccacagcgcaaagccgccgttatcacgttgcatttgcagcaaacgggaaatgccgatatcgacgcttgcacggcgtttctcatcactgtcgcctttgatgcccaacgcctgcagttgggctgcgttggtataaagactcggaaacaggccgctggcggtttgctcaagacagccgtacggatacgcttttaactctttgatataacgtgcgatgttcagcggtggtttgccgctcaacaacaattgcccttccagcgtaacagggctgaagttttgcaatccatccgccggaatcgcccatgtctcaccaggctgtaacgccgtaccgtaattaaccgtttgtgccgggaacgccggacggacgccgattttccactgcttatgctgatcggcaacggtttcacccggtaacgctaacccgctaatggtggcctgaatttctccatcgccataacccggcaatgctcgcaccgggataaacagcgtagtacgcacacctggcgctaattcaacggctgcgggactatcgctgaccagttcaagcaaaccactggcggtcagggcaacgttcagtttttgcggtttatcggtaagattagtgatatccagcgtcagacggctggtatcgccactcgccataaagcgcggcatgttcagttcagcaatcaccggtgcggcaactatcactttactttcgttgctaccgaagtcatctgccgtccaggcttgcgccatgacgcgcaattcaccgttaaaatcgccaatcggcagtgtaacgctgccttcgccctgttcgttgagcgttaccggcagcgcctgctgcacgacaatattgacgtgattgaccggcggtttaccaccacgtttcagctcatcaccatcgccaccgaaacgcagagctgccagacgcccctgaccttcaataacctgaccgtaaatatcgtaaatgtctgcgccatagcgtttctgaccaaagaacgcctgccacggatctggcgtgacgtagtcagtaatattcagcacaccactatcaacggcagacaccagcacattcacctgtttaggcttctcgccatttttagtgctggctttaattttcacggttaatggttgattgggacgcatttttgctggtgtttccagcgccagatcgaggcgacggttttcatcgccaagcggcagatgcaacacaccaaccgcgcgttttggcgtcgcggagcgagatttatcgccaggacgtaccaccagcgtacttaaatacagatcatgacgattccaggttttatcgaccggaatcgtcagatccagcccttgagcccgaacatcaatctcttgccaccacagcggcccttcactggactcgaccatcgcataacctttacccgccgttggcgcggcgatatgcaacttaatggtgtcgccagggcgataactggctttatccagtttcagcgtgacacggtcgggtcgcactgcgccgctaccgtcgctgttgtcctgccagctatagccagcccagaaacgaacactactgaccgcttcattcggcgctttgacttccagacgataagcgccccactctaccggaaaactgaccttgccggtttcgtccgctttcagatccagagtttgttcattttcgatcagatctttttgatcaaactgactctgccagccttcatcttcactccagttccagtagtaatcgcggcgttcgcgaatcaggcgcacctgcaagccgctcacggcttttttcacgccttgcgcatcgctataaacgatgtcaaaagcggcgttactgccttcatcaacaatgggctgtttcaccgtgctgtcagtacgataatcgtaaacgcttttgctggcgaactgcggacggatccccggcaatgcatcggcaggccagatagcctgctcagcgcggcgcgtcaccgggcgaccgccgctttccagcaaactaccctggaaaataacctgtaatggggaatgcgtttccttccactggctttctgtagaaacttcgccgcgccctttatcatccagcgtcaactgaacttcatccagcgtgcgggaaagattttcggcagctatatcgccgaattcaaaaccaggtaaggcactcacagcttcacgcagtgggcgcaggaaaagttgcccttgcaaagtattaccattagcaggtgcaccatacaggtagtaccccaccacggagaatttcacttcatctttcggcgttagcggggttttctcaccggtcagattcagcgccatgcgctctggcataaaatcttcgacgtggaaatcccacatccgatactgattatcgcccgtgttagcgcgaatatgccacataccggttgccgcattgctatcgagtggccaggtaaagtggtagaggccattctccggctgactaacgacgctcctgagtacctgcccatcgggtttaatcacgtctaacttgatgggttgattgggcaacgctttaccgtctgcatcacgcagcaaaccattgaggattaccgtttcacctgggcgataaagatcgcgtgggccaaacatgaaaaactgtttgctatagcctggcgcgccagcaatgttaaattctgctaagtccagcgccggaagttttaaatcgagtagcgttgtctgaccgtctttacgcgccaacagtaatgccgcgtttttatcattttccagctgcacatgcccctgagcgtcactggttgcctgagtcagagtctgccctttctcatttaataaagagacttcaattccttgctgggccgcgccgttttccagactttgggtaaagatatccagacgattgtgataacggtgagcactaacgccgatatcacttaacgtaaacagcgtcgcgggattactgtaatcgtaacgtccagcctgattcatcacagccagatacacgcccgcctgctgaagcggtttgatatcgcccagcggcagcaataatttttcacgggtgttacgcgcaggattgagatcaaaccgtccggtgtagaccagatccgccatctgcagcagtttgtcactctgccagttcgccaggctattgcggtattcccattggctaatgaatgctggcagagattctggcttaacgcggaagaagttaacatcgacattattaacgttgagcgccattaccggcagcccttcaacgactttgccaggcagcaggctaccacggctggcaaaaccgacgctgggttggatgtcgcgggtagttatagttttttcgtaatctttactgaaggttgcgttgttgagtgctttgacctccttgccaatagtaacgatcaaatcacgtttcggttcgaggtggcgtaaacgtaactctttaagattatcactcagctcccaggcaccatccactttgccgcttttttttatcgacgacatgaataacgcgactgaaatcctgatccgggtcgagagggatggagaacgtcagcaccagcgtggctgcaccatcaagttggacttcagagagatccagcaatgtcagcaccttaccggcactctgttgggccagtttttgtctctccggcacggagagttttgcactactcgcgttttcactagaggccgctttagtaacttcagaaggcgcatcttttttcaccgctgttggcgcgttatcgttgttgtcgcaccctgccagcgccagcattagcatgcaggcggctacgcgtaactttttcatttttcatccctgccacaatggcccgttagcaacgtcgaataattattatgcgtgagaatttacgttatgtaattcagtatcacgcccatacaatccgaattttagtgagaattgtggctcagacagccaaatcagcctcttttgcttgtcgcttttcactaaacatccgacaatttagcctaaccccggcaaaaatggagatgcctatgtccacgacatggtttgtaggagccgactggctcgccgaacatattgatgacccggaaattcagattatcgatgcccgcatggcgagccctggacaggaggatcgtaacgttgctcaggagtatctgaatggacatattcccggcgcagtgttttttgatatcgaagcgctttctgatcacacttccccgcttccgcacatgctgccgcgcccggaaacgttcgccgtggcgatgcgtgaattaggcgttaaccaggataagcacctgattgtctatgacgaaggtaatcttttcagtgccccacgagcatggtggatgctgcgcacctttggtgtagagaaagtgagcattctggggggtggacttgcaggctggcagcgcgatgatctgctgttagaagaaggtgcagtagagctgccggaaggagagtttaacgccgcgtttaatcctgaagccgtggtgaaagtaaccgatgtattattggcaagccatgaaaatacggcgcaaattattgatgcccgcccggctgcacgttttaacgcagaagttgatgaacctcgcccaggtttacgtcgcggacatattcccggagcactgaatgttccgtggacggaactggtgcgcgaaggcgaactaaaaacgaccgatgaactggatgcgatattttttggtcgcggcgtcagctacgacaaaccaattatcgtcagctgcggctctggtgtaacggcagccgtggttttgttagcactcgcgacgctggatgtgccaaacgtgaaactgtacgacggcgcatggagtgaatggggcgcgcgggcagatttaccggttgagccagtgaaataagtattttacaggcaataaaaaaccgccgaatttggcggttttttattgctagtctggttcgcggcctttccagcaggttgacttgtgttacatgagcaacgcaggtgcttcacagcaaaacaatactcaccagtaactctctttttgtcaagcaaaagagagtaattattgtttatttagcgtattatcgacaccggccctttccgccgtgttcggtaataaaataacctggcttattagtccgaattcagacaaatataaataaatcctgctcaaaattaaaaattctaaccggtaaaagatattacttaaacatgtaaattcactttcctttaaaaaacaaaaaaccgccaaaatcaggcggttttttgttgctggtccggttcgcggcctttccagcaggttgtattaccgtagtaatgcaagcgcgtctcagcggagacaatactcgccagtaactctctttttgtcaagcaaaagagagttattattgttctgttagtgtattatccactgcggccctttccgccgtctcgcaaacgggcgctggctttaggaaaggatgttccgtggccgtaaatgcaggtgtttcacagcgcttgctatcgcggcaatatcgccagtggtgctgtcgtgatgcggtcttcgcatggaccgcacaatgaagatacggtgcttttgtatcgtacttattgtttctggtgcgctgttaaccgaggtaaataataaccggagtctctccggcgacaatttactggtggttaacaaccttcagagcagcaagtaagcccgaatgccgccctttgggcggcatattttagattatccgattctgtttaaagtcacgcaaaaaaccaccccagcgacgttcatagaatggcgcaatatgttcggtaataaagtggctaattcctttttccccttttttcacctgacaaatatcgattggttcatcgccaggtaatgtatcggtcgctacacttcccgtcgcctgaataatttcttcgatatcaccatcggcttcaatgccaataagtaaattaggctgtgcctcttcgttctctttaatactacaaataaaagcacgcttcaccggcttaatggttttaaataaggtggtgagactatcaatcatttgtgctggcggctctgcgacttcgcttaatatcaggctttcaccgccttccaggatttcctggctgctcagcggatttccctcttcaccaatcaacaaactgatttcacgcggcataaattctttaccggttggcagtttggcattaaggaagagcgtttcgccaagtgtcatctcaaacagcgtgcgaacgggcattacgacaaatgcctgttcgtcttcaaccgcctgttgaagtgcttctaagctggtgaaaaaaggaatgacgctggtgccgtcttctttttcccagtgctgtaaatcaagcgcgctatcttcaaccacagcctcgccctgcgccgccgtaccaggcacccagacggtggattccagtagagtacggaaaaaggccgggcggtgcgccggttcagttgctgctttttccagcaggtcttcaagttcgttttttgtttcggacataagaaccacaattcattcaacgttcggggcgcaaatgcctgatgcgctacgcttatcaggcctacaagggattcgcaatttgttgaatttgcagaatttgtaggccggataaggcgtttacgccgcatccggcatattagtttacgccgttaacagattagctatcgtgcgcacaccaagtcccgtagcgcccgcagaccactgttcaaccggcgctttacggtaagtcgcgctgcagtcgatatgcagccagccttgctgatagttctcaacaaagtggctcaggaagcccgccgccgtgctcgcgcctgccggatacgccgcgcttccggtattgttcagttcggcaaagttagacggcagctggctgcggtggaactccgccagcggcagacgccagaacggttcgttctcctgcgcggcactcgccagcaagcgaccggccagcgcatcgtcaaaactgaacagcgcgtgataatcattacccagcgcagttttcgccgccccggtgagggtcgccgcatcaatgatcatttccggtttctgcgcactggcatcaatcagaccatcggcaagcaccagacgcccttcggcatcagtgttcatcacttcaacttttttaccgttgcgataggtgatgatatcgcccagcttgaacgcattgccgctaatcaggttatccgcacagcagaggaacagcttcacgcgcttgttcagtccgcgcgtaatggcaaatgccagcgccccggtaaccgttgccgcgccgcccatgtcgctcttcatgctgtccataaacgcagtctgtttgatgctgtagccgccggagtcaaaagtgatacctttacctaccaggcacgcgtacactggcgcttctttatcgccagttgggttgtaatccagcgccagcaataccggagaacgttcactaccgcgtccgactgtgtgcagccccatataaccttgctcacgcagatcttcgcctttggtgatccgataagtcacacgatcgcccgcgacgttgctgatcagatcaacagcacgctgtgccagttggcttggtcccaattcttctgccggtgcgttgatggtgtcacgcacccagtcgatgatcatcaggcggttatccagttcctggcgctgggcatcgtccagatccggccacaccactttacgcgtgcctttcggggctttgtaaccttgccagaatgcccagcagcgatccgcatcccagccttcaccgcttaactgaacatgcttgatgcccagaccgtcaatcttgcgcgccgcacgctggatcagccccagatcgtctgccccgttcaaatgcagggtaatgccgtcattattaatgctgtaagttgctttttctccccagcgcgcgtcggcaggttgggtagagagggtaatcttcatcgcttctgtcattttagttatccttctttgtaaaagggccgccagttggcagccccaggatttttccgctaaatgattcgcgttgcaggaaggcggcaagtgagtgaagccccaggagcatagataactatgtgactggggtgaacgagcgcagccaacgcatctgcggcgtgaagcatgacgcggaaattattcggcctcgtccagccagactaacaaaatcgcttcgaggattttctcgttggatgcctgcgggtcgtcgtcgaaatcttccagatcgcaaatccactgatgcatatcggtgaatcgaaccgttttcggatcaagatcgggatacgcatcgtacagtgcttcgccaatttcgcggctatcggtccacttaagtcccatactaacctctgttaatgctcacgcgcatggttgatagtgtaacgcgggatttcgactactaaatcttcgtcggtaacgcgcgcctggcagcttaaacggctttccggctccagtccccaggctttgtccagcatgtcgtcttcctgctcactgctttccggcagactgtcaaaaccttcacgaacgatgcagtggcaggtggtgcaagcacaggatttttcacaggcgtgttcaatctcgataccgttacgcagagctgcgtcgagaatggtttcaccgctattagcttccagaacagcgccatcagggcagagatcctgatgaggcaaaataacaatctttggcatattaaacctcgtccacggaatggcctttcagcgcacgacgaacgctctggtccatgcggcgagcggcgaaatcctgggtttgtttgtctacgtttttaatcgcttgttcgatggcgtcaacatcatcgccctgcgccacttcactcaggtgagcggcagcatcgtcaatgacctgacgttctgcggcgcttaacagcgcggcatcagcagccagcgcgccgtgcagactttccagcacacgcgccgcttctactttttgttctgccagcattcgggcttttacgtcctgctcggcatagctcatactgtctttgatcatgctagcgatttcgctatcggtcagaccgtaagacggtttgacctgaatagacgcctcaacgccggtggatttctccatcgccgtcacgctcaaaagaccgtcggcatcgacctggaacgtcacgcgaatatgcgcaccgccagccggtagcgccggaataccacgcagcgcaaaacgcgccagactgcggcagtcctgcaccagttcgcgctcaccctgcattacatggatagacatcgccgtctgaccatctttaaaggtggtgaaatcctgagcgcgggccaccggaatagtggtattacgcggaatcactttctccaccaggccgcccatcgtttcgaggcccaggctcagtgggatcacatcaagcaacagcatttcgctgtctggcttgttacccaccagaatatccgcctgaatcgccgcgccaatagcgacgactttatccgggtcgatggaagtcagcggtggacgaccgaaaaattcgcctacccgttcacgcaccagcggcacgcgagtagaaccgcccaccatcaccacttccagcacttcatcagcttctacacccgcgtctttcagcgcgcgacgacaagccagtaaggttcgttttaccagtggcgcgatcagttcattgaattgttcacggctgatttcgccctgccagcccgcaacgttaacggtcacggagtccgcatcgctcagcgcgattttggctgcaatggcggcatccagcagttcacgctgaacgcggttatcgctacgatcaggaatgcccgcctgctcgcgaatgtaatccgccagcagatggtcgaaatcatcgccgccgagcgcggaatcaccgccggttgccagcacttcaaacacgccgcgacttaagcgcagaatggaaatatcaaacgtcccgccaccgaggtcataaacggcgatcacgccttcctgaccggaatccagcccgtaggcgatagccgcagcggtcggttcgttaagtaagcgcaggacgtgaaggcccgccagacgcgccgcgtctttggtgccctgacgctgggcatcgtcaaagtacgccggaacggtgataactacaccatccagctcgcctgccagggcttcagttgcccgcgccgccagtgctttgaggatgtccgcagaaacgcgcaccgggttcagcagccccgccgccgtttcaatcatcggcaggccgttttcgctggcctggaattgataaggcagatgcggatagcgttgctggatatcagccaggctgcgtcccatcaggcgtttaacagaactaattgtgttggcggtatcgagcgctgcattagtacgcgcgtcataacccacgctatgcccttgctgttgatagtgaacaacagatggcagcaggtgacggccttcatgatcggctaacgtttcggcctgaccgctgcgcactgtcgccaccaggctgttggttgtgcccaggtcaataccggccgccagacgacgctgatgcggcgcagcactcaaaccaggttcactaatttgtaataaggccatgtttagcttccagaaattaaaaatcgagcagtttttcttcgagttgttcggcactgcttcgcagtttatcgagaaaacgcagcttacgcacggtatccgccgccgcgtcccacgtctcgttgtctaactgttcaaccatcaactgatggcgggtatcaaacatctttttcacacgtttgataaagctttccagccgcgcttcatctttcgcctgttcgatctcgtccagctcttcgcgcagctccaactgttccatcaggaacgcggtgtcgcgcacagtatgctgctcgctggcgagatcaaagccgtgcaaagaaagcaaatattccgcgcgcattaacggatgacgcagcgtttgccaggcctggttaatggttgcagattgctgtacggcggcgagttgttccgcctggcttccgctggcgaatttatcaggatgatactgacgttgtagatcctgaaaacgcaggctcagcgcctgggtatcgagttgatagcgggcaggcaagccaaagagggtgaagtaatccataacattctcagggctgcgatccgccgcgataacggcgaatcaggtaaaacaaaccccacgcgcaggcgaccacggtggggttatcggtatgcgcatcaaacgtggaagctttcgccgcaaccacactcatctttgacgttcgggttggtgaatttaaacccttcgttcaggccttcttttacgaagtccagctgcgtaccgtccagaaattgcaggctcttgccatcgaccacgactttcacgcctttgtcttcaaacacgatgtcttccggcgtcggttcgtcaacaaattccagtacataagccataccactacacccggaggttctcacgcccagacgcaggccaaaccctttaccgcggttagccagaaaggtatttactcgcgctgctgcactgtcgctcagtgtaatgctcataaccaaacctcaactcttattttgcttcacgtttgcttttatagtccgcaatggcggctttgatcgcgtcttctgccagaatagaacagtgaattttcaccggcggcagttcaagttcttcagcaatatcggtgtttttgatcgcctgcgcttcgtcgagagacttccctttcacccattcggtgaccagggagctggaagcgatagcggaaccgcagccgtaagttttaaaacgcgcgtcttcaatgataccttcatcgttgactttaatctgcaacttcatcacgtcgccacaggccggtgcccccaccatgccgctgccgacgttctcgtcgttgttgtcaaaggaacccacgttacgcggattctcgtaatggtcgataactttttcgctgtaagccattataaattctcctgattccgataccgattaatgatgagcccattcgatgctgttcagatccacgccctgcttgtacatttcccacagcggagaaaggtcacgcagacgaccgatggatttacgaactaactcgatggtgtagtcgatctcttcttcagtagtaaaacgacctaaagagaaacggatagagctatgtgccagctcgtcgttcagccccagcgcgcgcagcacgtaggacggttcgaggcttgcactcgtacaggcggaaccactagaaactgcgaggtctttcagcgccataatcaggctctcaccttcaacgtagttgaagctgacgttgagaatgttcggcgcaccgtgttccaggtcaccgttcaggtaaacttcttcgatatctttgatgccgttccacagacggttacgcaggccgcgcagacgttccatctcggtcgccatctcttcttttgcgatgcgataggcctcgcccattccgacgatctggtgaacaggcagagtgccggaacgcataccgcgctcgtgaccgccgccgtgcatttgcgcttcgatgcgtacgcgcggtttacgacgtacatacagcgcaccgatacctttcgggccatagattttgtgaccggagaaagacatcaggtcaactttcaactggctcaggtcgataggcagtttacccacgctctgggttgcatcaacgtgatagataatgccacgagcacggcacatttcgccgatagccgcgatatcctgcaccacgccgatttcgttatttacgtgcatgatggacacgaggatggtgtcgtcacgcatcgctgcttcaagttctttcaggtcgataatgccgttacgctgcggtgccaggtaggtgacttcaaaaccttcgcgctccagctgacggcaggtatccagtaccgctttgtgttcggttttgctggtgatgatgtgcttgccttttttctgataaaagttggctgcacctttgatcgccaggttgtcagattcggttgcaccagaggtaaagacgatttcacgcggatcagcgccgaccagatcggcaatctgattacgggcgatatctaccgcttcttcagcctgccagccgaaacggtgagaacgggaggccgggttaccaaaggttccgtccatcgtcataaactgcatcattttctcggcaacacgcgggtccaccggcgtggttgcggagtagtcgagataaatcggtaatttcattgctctataaactccgtacatcactcaatgcaaggaatcaggctaccggctggatgtacgaccgtgtttacggagtatttagcactccggcctgattctgaattctttttattaagcgcgtaacttaacgtcgatcgcgtcttgtgtgcgggtgcgtggcgcgtcgtgagtatgctgacgaccagacacatccagcacttcctggttattaaccagttcgcctaaagtaatgttgttgagaaaaccggtgagacggtcgctcaaatcacgccacagcgcgtgggtcaggcatttatcgccgccctggcagccgcctttaccctgacaacgggtggcatctacagattcgtcaacggcgctaattacttcgccaacggcgatgctgctggcatctttgcctaacagataaccaccgcctggtccacgtacgctggaaaccagaccatttttacgcagacgggaaaacagttgttccagataagaaagggaaattccctgacgttcggaaatatcagccaacggtaccgggcccgcttcagagttgagcgcaacgtcaagcattgcggtcacggcatagcgccctttagatgtcagtctcatgtcttacttcacctcaaactcgcccctgcccggggttttttattgtaaaagtgggggtattgcatagcagggtcaagtctgacattcccgagtaaattggtcaactatttacttgactgatttagtcgggtatttaaccttcagtgccatttttttatcgtggcgtttgtacctgttgtcggatgcggcgtgaacgccatatccgccctggggttctgtacactgtaggcctgataagacgcattacgcgtcgcatcaggcaacggctgtcggatgcggcgtgaacgccttatccgacctacggttctgttcactgtaggcctgataagacgcattacgcgtcgcatcaggcaacggctgtcggatgcggcgtgaacgccttatccgacctacggttctgttcactgtaggcctgataagacgcattacgcgtcgcatcaggcaacggctgttattcggccttgttacctttattctgctgctcaatagaagccagaatcccgcgcaggatattcaactcctggctttccgggcgcgcacgggtaaacagacggcgcaatttattcatcacctgccccggatggttttcacggataaaaccggttgccagcagcgtttgttccagatgaccataaaaacgctccagatcatcgaccagcggatacggcgtctcttcatgctcgacctgctcgccgttttcctgagttgccagccaggccatgcgcacttcataggcaataacctgaaccgccatcgccaggttcaggctgctgtattccgggttagccgcaatcgcgacatgataatggcatttctgcaactcttcattggtcaagccgacgcgctcgcgaccaaacaccagcgccaccggggtatttgccgcttcagcgacgcttttcaggccgcattcgcgcgggtcgagcatcggccatggcagcgtgcgggaacgtgcgctggtgcccaccaccaggctacaaccggctaacgcttcgtcgagcgtatcgacgatgtgagcattaccaatcacatcgctggcccctgctgccagggcaatcgcctgggagtcgggtttcaccagtggattaaccagccacagattggttaatcccattgttttcatggcacgggcaacagaacccatattgccggtgtgactcgtctccaccagcacaattcgaatattttgcagcattgtctttcttcatctaaagattattcacgcatcttatcataaaacgaagacagatgccgatctcgctgctatactctgcgccgttttcccgttctttaacatccagtgagagagaccgatgcatccgatgctgaacatcgccgtgcgcgcagcgcgcaaggcgggtaatttaattgccaaaaactatgaaaccccggacgctgtagaagcgagccagaaaggcagtaacgatttcgtgaccaacgtagataaagctgccgaagcggtgattatcgacacgattcgtaaatcttacccacagcacaccatcatcaccgaagaaagcggtgaacttgaaggtactgatcaggatgttcaatgggttatcgatccactggatggcactaccaactttatcaaacgtctgccgcacttcgcggtatctatcgctgttcgtatcaaaggccgcaccgaagttgctgtggtatacgatcctatgcgtaacgaactgttcaccgccactcgcggtcagggcgcacagctgaacggctaccgactgcgcggcagcaccgctcgcgatctcgacggtactattctggcgaccggcttcccgttcaaagcaaaacagtacgccactacctacatcaacatcgtcggcaaactgttcaacgaatgtgcagacttccgtcgtaccggttctgcggcgctggatctggcttacgtcgctgcgggtcgtgttgacggtttctttgaaatcggtctgcgcccgtgggacttcgccgcaggcgagctgctggttcgtgaagcgggcggcatcgtcagcgacttcaccggtggtcataactacatgctgaccggtaacatcgttgctggtaacccgcgcgttgttaaagccatgctggcgaacatgcgtgacgagttaagcgacgctctgaagcgttaatgactcaggcgggtgatatcactcacccgccctcgcctttcaggcgctattccgaaatacttcctcactgctttactttctttcgtcactctcccaccatctttccccgattaatggatgataaagaagagccaaggaaaggttatggcactgccagtgaacaaacgcgttcccaaaattctgtttattctctttgttgttgccttctgcgtttatttagtgccgcgcgttgccatcaacttcttctattatcccgacgataaaatttacggtcccgatccctggagcgcggaatccgtcgaatttacggctaaggacggtactcgtctgcaaggctggtttatcccttctagcacgggccctgctgacaacgccatcgcaaccatcattcatgctcacggcaatgccggaaatatgtccgcccactggccgctggtcagttggttacccgagcgtaatttcaacgtttttatgtttgattatcgcgggtttggtaaaagtaaaggcacgccgtcccaggccggattgctggacgatacgcaaagtgccatcaatgtggtgcgccatcgcagtgatgtaaacccacaacgtctggtgctgttcgggcagagtattggcggggcgaatattctggatgttattggtcggggtgatcgtgaaggcatacgtgcggtgatcctcgactccacatttgcctcttatgcaaccatcgccaaccaaatgatccccggcagtggctacttacttgatgagagttacagcggcgaaaattatatcgccagcgtcagcccgatcccgcttttactcattcacggtaaagctgatcacgttatcccatggcagcacagcgaaaagttgtatagcctggcaaaagagccaaaacggttgatcctaatcccggatggcgaacacattgatgctttttccgatcgtcacggcgatgtttatcgcgaacagatggtggactttatccttagcgcgttgaatccgcagaactaacccatgatcgctagcacgataatcattcacaaaaccaccttaagacatgctaatccactggtcagaacagtttaagatgagaaaaattctgtgacgcttgccaacatttctgatgattagcattcccttcgccatttccttgagcaaactttagctattcttatcaattatgcttatgggagatctacagatgatgcctacgcttgctccaccatctgtccttagcgctccccagcgccgctgccagatcttgctgacgctctttcagccggggttgaccgccaccatggcaaccttcagcgagcttaatggtgtggatgatgatattgccagtcttgatatcagcgaaacaggacgggagatcctgcgctatcatcaactcacactgacgactggttatgacggtagctaccgggttgaaggtacagtgcttaaccaacgtttgtgtttatttcactggctacgacgtggtttccgtctgtgtccgagttttattaccagccaattcacccccgccctgaagagtgaactgaagcggcgcggaattgcgcgtaacttttacgacgataccaatctacaagcgttagtgaatctctgctcccgacggctgcaaaaacgctttgaaagccgcgatattcatttcctgtgtctgtatctgcaatattgtttgctgcagcaccacgctggaattacgcctcagtttaatccgctccaacgtcgctgggcggaatcctgccttgaatttcaggtagcgcaggaaattggacgccactggcagcgtcgggcgctccagcctgtaccacctgatgagccactgtttatggcactacttttttccatgttgcgggttcccgatccattgcgggatgcgcatcagcgggacagacaattgcgtcagtctatcaaacgtctggtaaaccattttcgtgagctgggaaatgttcgtttttatgatgaacaggggttatgtgatcagctttatacccacctcgcccaggcgttaaatcgcagtttgtttgccatcggtattgataataccctgccggaagagttcgccagactgtacccacgcctggtgcgcaccacccgcgcggcgctggccggatttgaaagtgaatacggcgtccatctttctgatgaggaaagtggtctggtcgcggtgattttcggtgcctggctaatgcaggaaaacgatctgcatgaaaaacagattattcttcttaccgggaatgatagcgagcgagaagcgcagattgagcagcagttacgcgaactaacgttactgccgctcaacattaagcatatgagcgtaaaggcatttttgcagacaggcgctccgcgtggcgcggcactgattattgcgccttataccatgccattaccgctctttagtccaccgctgatctatacggacctgacgctgacaacacatcaacaggagcagatccgcaaaatgctcgaaagtgcatgatcagcaactgggaacaactttcgggcgcaaaaacattgccggaagcgccaccagcgccattacccagaacacgccgtggcccagatattgatacaggaaaccggcgaaaacggtcatgatagcgatactgccgcccatcgcgacggcagagtaaaccgcctgtaaacggatgacttcgctaccctggcgagcagcaatataacgcatggcggccaggtggcagaccgtgaaggtgccgcaatgcagaatttgcaccactatcaaccacggcaacgccgtagttgctcccataatgccccagcgcactacgccgcaaatcgcgctgatcaacagcatatcgcgtgcactacaacggcggaaaagtttattactcagcgcaaagataatgacttccgccaccacgcccaggctccacaaataccccaccgcgctggcgctgtagccagctgcctgccagtaaatggcgctaaaaccgtaataggccgcatgtgccccctgcaataaacaaacgcaggccagaaagcgccagttctggcgaaccagcgccaaccacgcagaccaaccggtgctctcctgctggcgacttgccccttgtggctgaatcgtcggacggatgagaaagccgagcagcatggatgccacgcccaacgtcaacagcgcgaggatcacccgataatcaaacatagtgaccagtttgcccgtcagcgcgctgccaatgacaaacgccacgctgccccacagtcgcactttgccgtaatcaagcgggaactgcttttgccacgtattcgccagtgcatcggtcaacggtaccagtggactgaaaaagaggttaaagccaatcatcaccagcatcagccacgctacgtgcgcccccgcccagaaggcgacagcaaagagaagtgtcagcagtgccagcacgcgcaaggcggaaatcaggcgggaaggatcgctgacgcggggcgcgatgagcaaactcccgaggaaacgggcaaccagacctgcccccaataacaggccgatggtttctggcgttaaaccaatccctttaagccagacgctccagaaaggtagaaaaatgccgtaactaaaaaagtatgtgaaatagccgagcgccaaccagcgcgtggattgcaaaaccatgagtccctcccgtcaggaggcgttagtctggggttaatcgaatgttggtgcaagttgaaaaataagaatattcgagcctgcttcccgatgtctgtaacgccagttcacaagcactaaaaaactgagatccgcgacgcatgttgcaaaaataatgcgtaattatgccgttacgcttgccaaacgttcctgcacaatggcgatgaaatcgcgtaatgccggcttcatctcccctttcttccacgccatcagtaaagcaatggaaggcacatttccggcaatgggacgaaaaacaacctgtccggtattaaaattattcatataaccgggtatcaaagtgacgcccagccccatgcccaccagattcatggtcaccagaatattcgttgccacctggacgatatttggctggctgttttcttgcgcaaaccacgctttaacgatcggcgcaaggctaccggaatacaccggatcggtactgacgaaattcacgccatccagttgcgcggcggtgatctctttttcatgtgctaaagggtgatcaaccggtaacacaaccactaatggttcgtcaaaaagctccagataatcaatctccgggctataaacaggatggcgcattaagccgacgtcgagttcaccacggcgaattttttcctcctgttgcgtggtgattaaactcaccagctcaatcaaggtgtctggctgtctgagacgaaacatcggtaatacttttggcagtaaattcacttccgcgcttggcacaaagccaatggttaattgtctgtcttcctgaacaattttccgcgcccgtaatttggcattttccgcttgttcgaggattgccagcgcgtcctggagaaaacattctcccgccgccgtcaacgcgactttgcgcttatccctcaccagtaacggaacaccgacacagttttcaagatcgcggatctggctgcttaagctaggctgactggtatgcagtttttccgccgcacgggtaaagttcagtgcctgcgccactgcgacgaaatagcgtaaatgccgtagttccatcaccttccccttgttatcgaaaaaacgtctcagctggtagaaattaactatttcacatattagcaaccaaccagcaacatccttatggcacaaaaatagaaggtcaatacatcttatctttcaggattaaaaaatatgaccacacccagtgatttgaacatttaccaactgattgacacccaaaatggtcgggtcactccgcgtatttataccgacccggatatttaccaactggagcttgagcgtattttcggtcgttgctggctatttctcgcccacgaaagccagatcccaaaacccggtgatttctttaacacctacatgggagaagatgcggttgtcgtagtgcgtcagaaagacggcagcatcaaggcgtttctcaaccaatgccgccaccgggccatgcgtgtgagttatgcagattgcggcaacactcgcgcctttacctgcccgtatcacggctggtcttatggcattaacggcgagttgatcgatgtaccgctggaacctcgcgcctacccacaagggttgtgtaaatcccactggggactaaacgaagttccttgtgtggagagttataaagggctaatttttggcaactgggataccagcgcaccgggcctgcgtgattacctgggtgacattgcctggtatctggatggcatgctggatcgtcgcgaaggcggcaccgaaattgtcggcggcgtacaaaagtgggtgatcaactgtaactggaaattcccggcagagcagttcgccagtgaccagtatcatgctctgttcagccatgcttctgccgttcaggtattaggggcgaaagatgatggcagcgataagcgcctcggtgatggacaaaccgcccgcccggtgtgggaaaccgccaaagatgcgctgcaatttggtcaggacggtcacggtagcggtttcttctttactgaaaaaccggatgctaatgtctgggtcgatggcgcagttagtagctattaccgcgaaacctatgccgaagcagaacaacgtttaggtgaagttcgcgccctgcgcctggcgggtcataacaatattttccccacgcttagttggctaaacggcactgccacactccgcgtctggcatccgcgcggccctgatcaagttgaagtgtgggcgttctgtattactgacaaagccgcctccgatgaagttaaagccgcttttgaaaacagcgccactcgtgcttttggtcctgctggttttctcgagcaggatgacagcgagaactggtgtgaaatccagaaattgcttaaaggccaccgcgcccgcaacagcaaactgtgtctggaaatggggcttggtcaggaaaagcgccgcgacgacggcattcctggcattactaactatatctttagtgaaactgccgctcgtggaatgtaccaacgctgggccgatcttctgagtagcgaaagctggcaggaagtgctcgataaaaccgccgcttaccagcaggaggtgatgaaatgagtgcgcaagttagtctagagttacatcaccgcattagccagtttctctttcacgaagccagcttactggacgactggaaatttcgtgactggctggcgcagctcgacgaagagattcgttacaccatgcgcaccacagttaacgcgcaaacacgcgaccgccgcaaaggcgtccagccaccgacaacctggatttttaatgacaccaaagaccagctggagcggcgaatcgcccgtctggaaacgggcatggcctgggcagaagagccgccgagtcgcacccgtcacttaatcagcaactgccagataagcgaaaccgacatcccaaacgtatttgctgtgcgggtaaattatctgctttatcgggcacaaaaagagcgcgatgaaacattctatgttggaacgcgtttcgacaaagttcgccgtctggaagatgacaactggcgcttgctggaacgggatatcgtcctggatcaagcggtaatcacttcccataacctgagtgtactgttctgatgaatcgaatttatgcgtgtcccgttgcggatgtgccggagggtgaggctctccggatcgataccagccccgtcatcgccctgttcaacgttggcggcgagttttatgccattaacgatcgttgcagccatggtaatgcgagtatgagtgaagggtatctggaagatgacgccacggtggagtgcccgctacacgccgccagtttttgcctgaaaacggggaaagcgttatgcctgcccgccaccgatccgctcaccacttatccagtacacgttgaaggtggtgacattttcatcgacttaccggaggcgcagccatgagcgatctgcataacgagtccatttttattaccggcggcggaagcggattagggctggcgctggtcgagcgatttatcgaagaaggcgcgcaggttgccacgctggaactgagcgcggcaaaagtcgccagtctgcgtcagcgatttggcgaacatattctggcggtggaaggtaacgtgacctgttatgccgattatcaacgcgcggtcgatcagatcctgactcgttccggcaagctggattgttttatcggcaatgcaggcatctgggatcacaatgccagtctggttaatactcccgcagagacgctcgaaaccggcttccacgagctgtttaacgtcaatgttctcggttacctgctgggcgcaaaagcctgcgctccggcgttaatcgccagtgaaggcagcatgattttcacactgagtaatgccgcctggtatcctggcggcggtggcccgctgtacaccgccagtaaacatgccgcaaccggacttattcgccaactggcttatgaactggcaccgaaagtgcgggtgaatggcgtcggcccgtgtggtatggccagcgacctgcgcggcccacaggcgctcgggcaaagtgaaaccagcataatgcagtctctgacgccggagaaaattgccgccattttaccgctgcaatttttcccgcaaccggcggattttacggggccgtatgtgatgttgacaagccggcgcaataatcgcgcattaagcggtgtgatgatcaacgctgatgcgggtttagcgattcgcggcattcgccacgtagcggctgggctggatctttaaggaagcacgatgaaagaaaaaacgatcattattgtcggtggcgggcaagcggcggcaatggctgcggccagcctacgccagcaagggttcaccggtgagctgcatctgttttccgatgagcgacatcttccttatgaacgacctccactcagcaaatccatgttgctggaagattccccgcagttacagcaggtgttacccgctaactggtggcaggaaaacaatgttcatctgcattccggtgtaaccatcaaaacgctgggtcgcgacacacgagagttagtgttaaccaacggcgaaagctggcactgggatcagctttttatagcaaccggcgcggcagctcgaccgctgccgttgcttgatgcactgggagaacgctgctttaccctacgccatgccggtgatgccgccagactgcgagaagttctgcagcccgaacggagtgtcgtgattatcggtgccggaactattggtctggaactggctgccagcgccacgcagcgcagatgtaaggtgacagtgattgaactggcggcaaccgtcatgggccgtaatgcaccaccgcccgtgcaacgctatcttttacagcgccaccagcaggctggtgtgcgcattctgctcaataatgccattgaacatgtggtcgatggtgaaaaagtagaactgacgctgcaaagtggggaaacgcttcaggctgatgtggtgatttacggtattggtatcagcgccaacgagcaactggctcgcgaggccaaccttgatactgccaatggcattgtcattgatgaggcttgccgcacctgcgatcccgcgatctttgccggtggcgatgtggcaatcactcgtcttgataatggtgcactacaccgctgcgaaagctgggaaaacgccaataaccaggcgcaaattgccgctgccgcaatgttagggctaccgctaccgctactgccgccgccgtggttctggagcgatcagtacagtgataacttacagtttattggcgatatgcgtggcgatgactggctttgtcgtggcaacccggaaactcagaaggcgatttggtttaatctgcaaaacggcgtgcttatcggtgcggtcacgctgaatcaggggcgtgagattcgcccaattcgcaaatggatccagagcggcaaaacgtttgatgcgaaactgctgatagatgagaacatcgcgcttaaaagtctgtaaccaggataattagcgaatatctcaatgcctggggcgtggcgaggtgcaagagtgtgtattacgtttaaaagtcattatcttgcaaagggattggttatgaacacactacgttattttgattttggagctgcccgccccgttttgttattaattgcccgtatcgccgtggtcttaattttcattatttttggttttcccaaaatgatgggctttgacggtacggtccaatatatggccagcttgggcgcgccaatgccgatgctggcagcgattattgcggtagttatggaagtgcccgccgcgatattaatcgtgcttggctttttcacccgtccgctggcggtgctgtttattttctacacgctgggtacggcggtgattggtcaccattactgggatatgaccggcgatgcggttgggccaaatatgattaatttctggaagaatgtcagtatcgctggcgcgttcttgctattggcaattaccgggccgggggcaatttctctcgatcggcgttaagaaagatgccggatgcggcgtgaacgccttatccggcatttaataaattacagccactctacccgcaagctcatctcactagttgtactttcccctggtgctagcgcaatgagatcacccccttccgggcgatgatgatcatccggcgcatggctcatcggttccagacagaagaaatcaaacgcatatcctttatcaaacgcagggtcggaaacaaagatgaaataacacggtgcaggtggcgtcgtttccatgatgatggcataaccttcctgcggctgctcgatgcgggcctgaccattccatccggcaaaaccattgttcacccactggcgcggcaacggcgcgggctggttaaaatccagttcctgcggtagctgctcgcaaaactcacccgccagccactgctcccgctccagccagtaaccgctcgcctgtgcctgaatccgcgtttgcgggctcaacggaaaataaggatgccagccggtaccaaatggcagcgtctctgccccttgattggtgacagagagcgtcaccgtcagcgtatccgccgttaaatgaaacgcctgacttacccgatagtgatagacaccgctgcgatgttcatacaccagacacaaactatcatcgctgtggctgacacattgccactcgcccagccagccatcgccgtgtagatagtgcgcatcccactcaacattcggttgcagttgatactcacgcccctgccagacaaaacgattgccgctcacccggtttgcaaatggcaccagcggaaaacaactggcatcggttgccacaccgctttttttaccaggacgtaagagcggcgtcgtatcgcgccagaagccttcgattacgccgccctggtcagaaacgtccagctttaggctcccgtgggataaggtatagatggtcatccgctaactccttaatccgggaagttaatcacaactttcccgcatttgccgctcgccatcagcgcataggcatcacctgcctgttccaggctgaagcgatgggtaatggcgttacgcggccacagcttccagtccgtcagatcatgggcgcatttttccatatggaacagactggtcacccaggagccgataatccgccgttgatggtgcatcagatcggcgctgacctcgaattccacttttccggtttcaccaatgtaaaccacccgtccccagtcagcggtggattgcagtgccagcaagcgacctgcggcattaccggaacaatcgagcgcaacatccgcgccaccgtgggtgagttcggcgataatctgcggcagaccttcggtggttgctaaatagccgtgatccatcacccctaactgttttgccatcgccagacgttccggcagcatatcaacgccgatgatccgttttgcaccgcgacctttcgccagcatcatcgccatcatgccgactggccccagaccgaccaccagcacgttatcactgccggaaacttcgccgcgcaaaattccttcatacgctgtaccaacgccgcaactgataaacgcaccatcttcgtagctcagcgcatccggcaggaggatcagatctttttcttccgccagcaagtattcggcatgaccgccgtcacgctgccagccgtaagccgcttttccttcgccagtacaagaaataggaaaaccgcgacggcagttcgggcaaaaaccacagccagaaatgtgatacaccagcacgcggtcgccctctttaaaatggcggcagccttgccccatcgccacaatctgcccgcacggttcatgaccgttgataaagccctggtataacggtttatcgggtgccgccgctgtggcacggtgttgatgatagatatagtggacatcgcttccgcaaatcccggaggatttcattttgatcagtacctggttaatccccggcgtcggcaccgcaacttcccgcagatcgacggtgctatttcctggtaaataagctgccagcatcgttttcataaatccctcattaacaatacgattaattttcatccctgccgcacccgcgccaggggcgttaaggtttagcgtttcgctttactgcttcgctgggtcagcaagatattcgccagcaccgccaccacgatgatgacgccgcgtaccacctgctggaaaaaggagttaataccgagcagcaccagaccgttaccgattagcgtaatcaccagcacaccaagcaatgtaccgaacagggaaccgcgaccgccggaaagtgccgtaccgccgaccacgaccgcggcgatgacgtcaaactccagaccgtttgcggcacctgcgttaccagaaccgaggcgcgccgccaacaaaatgccggtcaccgccgctaataatccgctaagggtaaagataagaatgcgcacccgacgaacgttgatgccgcacaactgcgccgccgtagcattaccgccaacggcaaaaacgctgcgcccgaaggcggttttgcggctgatgaacacaaacagcgcaaacaacacaatcatgatcagcgcggataccggcacaccgagaaattgtccgcccagccagtccagcacctcgttttcatcaatcggcactggcagtgcgttcgtcataaacagccccattccgcgcagggcgctccacagccccagtgtggcaacgaaacttggtacattaaacacgccgcgcagcaccccggccagcgttcccatcagcgcgcctaacagcaacaccagcaggcacgccaccgccagcggaacttcaaattgcagcaaaaatgccaggcacacgctgacaaaagccaccatcggcccaacgctgacatcaatttcaccggagataataatcagcgtcatcgcccaggcggcaatcccaatggtggcggcatcgcgcagcacgttcatctggttattcaaactgataaagccaggcgcgttcagggagaagaccagataaagaatggcaatcaccaccagcaaaccgatctcattaatatggcgactgacaaattgtttgaggctgacgctcttgccctgcggcaatggtaaactgctagcagacatcttcaggttcctcggtaaaattcatcagtgcacagacagaatggcggacatcagctcatccacattgaccggagcgtgaaactcctggctgaacgtgccgtgctgtaataacaggatgcggtcacacaccagcggcaactcctccacttcactggagataaacaccacgctttttccttcggcagccagctcacggacaatacggtaaatctgctgtttggcttcgatatcgacgccgcgcgttggctcgtcgagcaacaaaatctggctggcagcatagacccaacgaccgatcaccactttttgctgattgccaccagaaagcgtgccgatgggtgtttcgctactggcggccttgaccgtcatccgctgcatcacctcttcggtcaggcggcggatggtggaccattgcagcacaccgttggcgctgattttttgccgattggtcagcactgtattttcgtcaacgcccaaccagggaatgatccccgcttctttgcggttttctggcgtatagccaatgccgcgtttcagcatgtcgccgtaatcggggcgcgtgattttctcgccgttgataacaatttcgccctgttcatactcctccagcccaacaatcgccttcagcaattcactgcgccctgcccccagcagaccagcaatgccgagcacttcgccacgacgtagcgtaaaactgatatcctccagcttgggcttatggcgtaacgcacggacttccagcacggcctgatccacaatttcctgaggggctaccggcgcaatatcaacgtgatcgcgcccgagcatcaggctcacaatatgatgcgtggaggtgttttcgagcatcacatcgcccgccacctgaccatcgcgcataacggtggcacaggaggcaatgcggcgaatttcttccatccggtggctgacataaatcaccgccacgcccagtgcgctcatctttttcaccgcgctgatcaccagttcaacttccgcactcgcaaggctactggtaggttcatcaagaatgaccacgcgcggctcgcccttcatcacccgcgcaatttccaccagctgcttttgcgccgggcttagcgtactaacaagttgttcaggactaacgtcaacgcccagcgcctgtaagcaacgttgggcatcctgcgccatttgcaggtaatcaatcatgccgttgcggcggggccactgaccgaggcagaggttttccgccactgtcagcccttccaccagacttaactcctgataaaccgcgcgcacccccagttcagcggcacggcgagtcagcgtagcttcgtcaccttccagtcgcgtctcgccaatccagatatcaccgctatccgggcgttcgctgccggtaagcattcgaatgagagtgcttttgcccgcgccgtttttacctaacagcgcacgaacttcgcctttattgagcgtgaagttaacgttatccagcgcaacgacgccgggataacgcttatttcctgccaccacttttgctaccgggactgcctctgttgccgtgaacatagggacctctgcgaatcagcgattagggcagaccatcaacgtgcgttgccagccactgtttaccgtcttccgttttggtatagagatcgataggcacctgaatcactttttcaccgtcggcttgtttattgataaccttcaatgtttgcgcgaaaacagcattgcccattttcttaccggaaatatccactaccgctttcagcacctgattgttttccagctcctgagcaatttcggttgtcatatcgctaccgaaaacagcaatttttccggcctgattttgattacgtaccgcttttaccgcgccgagtgtcgcaccgccgctttcccccataatggcgttgagatccggcgtggagataattagtttttcaccaacggaaatcgctttatctaaaacagtcccttcctgattagcgacaatttgcgcgccgggaacgcgggattttaaaacttcttcaaatcctttacgtcgctgcacacaaacttcaaaggcttcgcaattgatgacggcaattttcggctggtcaattttattggcaataaaataatcagcggcagcgttacccagttttttaccaaattccagcggatcgccgaccagatacgcgctgacatatttatcgacccccttttgattaatacaggtgttgtagcaaatcaccggaatgcccgcttcactggcgcgacgaacggtacggctactgccattttcagacactgcgcttaaaataatggcatcgacattacgcgccacgagggtatcaacaaaggtactttctttgctaatatcaccctgggcgttagtttctattaactgaacttgtacactggaatcttttgccgcatcctgaacgccctgacgcactccagcgtagtatccctgagtatcaaggtatattgcgccaatggtcatttctttttccgcagccctggcaaatagtgcgctacctaatagcgtagccattaataatagattacgggttgttctcatttttgtaggcatagagcctcctgtagggtttttattaacaacggcttattctaattattttgtgatgagcggcagcgcgtgccgctcaaatattacagttaatagggtttagtgaacgcggttaaaaataaaaggcatcacggtggtgaataatgccgctttcggccaagccggattaatcgccgtcaattcagcgcgagcagactcatattgcgcaacctccccgagtcccgcggacgccagcatcgccaccatcaggcatttttctttatgctgctgttgtaaatcgccatacaggctcaacaagtcaggttggctgacggcaaagaaatccgcttcgatactggttttcgccatctcttgcgcccactgtttcatttcactaaacagttgctgtgcggtttgttgttcgcccagcagtcgcagcgccatcccttgccagaagagataatcaaccggctgatcgttgtaataactgtgaatgttaatagtgcgatcgccggtcgccgccagacgtaaacaacgcgtcgcttcagtttcatcgccctgcgcgttggcgcatatcgcctgccagaaccagatgtcgttatcagtttgccccggtaaacggccttcgcttaaattctccggataatgcagcgcggcatgaagcagttcgcaggcctgctgcggctgtctggcatcaagatgctgccaggcgcgtaataactggttgaggataaactgactggtgaccttcccttccccgccttcccacgggtggaatttgcgcgtggcgagaatgtccgccgctttgtctgcctgacccgtgagatgccacaaattgagcagttctgcggtcatgtcgtcgcgtttcagcgcaatttccagattattttccagacgcgccagtcgtttctccggtgtggctccacttaacttatccagcaaatcccgttcgaaaagcagacgtgcatcctgcggcgcaagctgataagcattatcaagataacgcgcggccagctcataatcgtgttgcttattccacgcatggatcgctaacccgcgccagccgtcggcaaactccgggctcatctctacgcaacgttgccaaaaggcaatggctttgttgtagctacgtttgttgtagtagaagcaagctagtaaatggcgagcaaaccagcactcttcaatactctccagcgccgccacttcttccagcgtattcgggaaacggacaaactgcgggaagacatcaatggcttttgcgaccagttcgccacgttcggctttcggcagcaagctggcttgcaggtaaagcggcagcgtgcgctggcagtccagtgcgttcagcatctctgccgccagggtgggcattccccagttaatcagttgcccggcggtcatcagggcgttaacgtcgcgtccctgacacagaccgcgccactgcgcgagagcactttcgctacgaccatcgaaccagttcagccaccacagagtggcgttcagcggataatcgcgcagcagtttctcgcgctgcacacgcgcgttgtcctgacgaccacttaacaccagcagcagattatgcaggcaaagcacttcctgattggttgggcaggcgcgaagactttgttggcaaaaatccagaccagcgtcgaagttaccattacgcgccgccagtcgtgccaggccataatagccaccggctttgctgttgccgctccagaccgcacgccagaaatcctcttcggcttgttgatattgtccctgacgttcgtaagcactggcgcgaatcaaactcgcctgtccgcactgcggatttttgttcagcgcatgtgcgcgtttcagagcctgagtggcatacgccaccgcttgcgggaaatctgcgcggttatattccagcatcgccagcgccaggttacagcgataatccagcgggtccagcgccacgccgcgcaggtagtaatcgaacggactacggctggcgtgatgatattgctccagatgctgaccgataaaccaggcttcatctgtactggtaatgtcttgtgctgccagtggcgctttggcgacgtccggtaacggcaacgcttgcggctgatgttcctgataactcagtacaatattgccgtcggcatcggagagctcaatggtcagcctttcaggattgataccgtgcaacacgccctggatggcggtcgcaggcatcagtgccacggcatcatcaagtaacgcgttgcatttaccgatttcgcggatcgccaggcggtatccgttcaacggagagatggcatacagcccccactcaatcccccgcttactacgctggagttttatcaccgcatcgcgggaggcattttgcaccatgcccaaagaatgataaggcaggaaatactgctcaaaacgcttctcttcgtaagcatcaagccaggtaaaatcgggctggttatcggcaaaaataccggtcatcagttcgatatacgggccgttattgtcggtcagactcttatcccacgcctggccaaattcactgtgtccccaactccactgttttttacctggcgcaatatggtggttggcaacgtgcagcaaaccgccatcttcatcgtgacaccacgcgccgacaaaatcgtactggcttttttcggccatataactggttggaacaggcacatttttatagcgagaaatgtccactccagcggagtagtccactttgtagtaagtgccggtagcgatggggaaagcggagacggcccgtttgccgtgatcaaacaccgccgttacatccggcgggaagacgctctgatgcccttccccccctttcactgccgggttggcccaccacaagaaatgacgcggcgtggcgttcccgttatagacgcggctggcgatttccagcgccgcccggtcagggcgcagggtgaaacctgtcatcacctgtaaaccatgcatcggctccgtttcgcctacccacaccgtctgtgcaccgtcttcatgggcttcgagggtgaaatcaacgggcataaaggtggtcgggcgatgatgttgcggccagttaaactcaatcccaccggaaatccacggccccagcagccccaccagcgcaggtttaatgacttcattgtgataaacaaaatcgcgctgtttcactttatcccacgcgcgatgcacccgaccgcccagttccggcaggatcatcactttgatgtagtcgttttccagccacaccgcctgccaggatttcagggttttctgctcgctcagcgtatcggtcacgccgtagggataaaccgcgccggagcttccctgataaacgcgattttccaggaacatgggatgtatatcctgcggcccggtttcataggtcgggatctcaacgcgctcttgccacacttttactggagtcatggtgccctcaatattaacaagacatactgaattaaaagatttgtggcagtgtattgaacaatctggcaatgttttcgcggaataatcacgcaattaactaaacaaggtttagtgaagatgagagcctgcattaataatcaacagattcgccaccataacaaatgcgtgattctggaactgctgtaccggcaaaagcgcgccaataaaagtacgctggcccggctggcgcaaattagcattccggcagtcagtaatattttgcaggaactggaaagcgaaaaacgggtggtgaatattgacgatgaaagccagacgcgcgggcatagtagcggtacatggctgattgcgccggaaggtgactggacgctgtgcctgaacgtgacgcccaccagtattgagtgtcaggttgctaatgcttgtttaagtccgaaaggtgaatttgagtatttacagattgatgcaccgacgccgcaggcgctgctgtccgaaatcgaaaaatgctggcatcgccaccgtaaattgtggccggaccataccatcaacctggcgttggcaatccacggtcaggttgatcctgtgaccggcgtgagccaaaccatgccgcaagcgccgtggacaacgccggtggaggtgaaatatctgctggaagagaagctcggcattcgggtgatggtcgataatgactgcgtgatgctggcgctggcggagaaatggcaaaataatagccaggaacgggatttctgcgtgatcaacgttgattacggcattggcagcagcttcgtgattaacgagcaaatttatcgcggcagtttgtatggtagcggacagattggtcacaccatcgttaatccggatggcgtcgtctgcgactgtggacgttatggctgcctggaaactgtcgccagcttaagcgcattaaaaaaacaggcgcgggtatggctaaaaagtcaaccggttagtactcaacttgatcctgaaaaactgactacagcgcagttaatcgctgcctggcaaagtggagaaccgtggatcaccagctgggttgatcgctctgccaatgccattggtttgagtctgtataacttcctcaacatcctcaatattaatcagatttggttgtacggtcgcagttgtgcctttggtgagaactggcttaatactattattcgccagacaggatttaacccgttcgaccgcgacgaaggaccgagcgtgaaagcgacgcaaattggctttgggcaattaagccgcgcacaacaggtgctgggaattggctatttgtatgttgaggcgcagttacgacagatttgatggcgcgataacgtagaaaggcttcccgaaggaagccttgatgatcataaacgaaaaattgcctgatgcgctacgcttatcaggcctacacggagattgcaatatattgaatttgcaaagttttgtaggccggataaggcgttcacgccgcatccggcatgaacaacgagcacattgacagcaaatcaccgtttcgcttatgcgtaaaccgggtaacgtgcgcagatgtcgagaactttacctttgatgcgctcgataacggcttcatcattgatgctgtccagcacgtcacacatccagccagccagttctttcgcttcggcttctttaaagccgcgacgggtaatcgccggagtacctacacgaataccggaggtcacaaacgggctcttcggatcgttcggtacgctgtttttgttgacggtgatgttagcacggcccagagcggcgtctgcttctttaccggtcaggtttttatcaaccagatcaaccaggaacaggtggttatcagtgccgccggaaaccactttgtagccgcgctcgaggaacacttctaccatcgctttagcgtttttagcgacctgctgctggtaagttttgaactcaggctccatcgcttctttcagagcaaccgctttaccggcgattacgtgcatcaacggaccgccctgaccaccagggaaaacggcagagttcagttttttgtacagctcttcgctaccacctttcgccaggatcaggccgccgcgcggacccgccagggttttgtgagtggtggtagtaacaacgtgagcatgaggaaccgggttcgggtagacgccagcagcaaccaggcccgcaacgtgcgccatatcaacgaacaggtaagcaccgatgctgtcagcgatttcacgcattttcgcccagtccaccacgccggaatatgcagagaaaccaccgataatcattttcggcttgtgttctttggcttgtttttccagatcggcgtagtcgatatgaccggtagcatcgataccgtaaggaacgatgttgtacagtttaccggagaagttaaccggagaaccgtgagtcaggtgaccgccatgcgccaggttcatacccagaacggtatcacctggttccagcagcgcggtgtagaccgcaaagttagcctgggagccggagtgcggctggacgttagcgtagtcagcgccgaacagttctttcgcacgatcgatcgccagttgttcaacgatatcaacatactcgcaaccgccgtagtagcgtttgcccggataaccttcagcatatttgttggtcagctgagaaccctgcgcctgcattacgcgcgggctggtgtagttttcggaggcgatcagttcgatgtgctcttcctgacgtactttttcctgctccatagcctgccacagttcggcatcataatcggcaatgttcatttcacgctttaacatccgcatctcctgactcagctaacaataaaatttttggcctttataggcggtcctgttggacaacggcgaacagtataaccgaatcattgtgcgataacaggtcttgacaaaggaatttacgcaaacgattaccttcaggctacgcaaggctttggagaataaagagcttgcaaccggaaacggatttcttttcaggtttgtgatgcaaatttttcacttcatcacattctttctgaaaaacaccaaagaaccatttacattgcagggctattttttataagatgcatttgagatacatcaattaagatgcaaaaaaaggaagaccatatgcttgacgctcaaaccatcgctacagtaaaagccaccatccctttactggtggaaacggggccaaagttaaccgcccatttctacgaccgtatgtttactcataacccagaactcaaagaaatttttaacatgagtaaccagcgtaatggcgatcaacgtgaagccctgtttaacgctattgccgcctacgccagtaatattgaaaacctgcctgcgctgctgccagcggtagaaaaaatcgcgcagaagcacaccagcttccagatcaaaccggaacagtacaacatcgtcggtgaacacctgttggcaacgctggacgaaatgttcagcccggggcaggaagtgctggacgcgtggggtaaagcctatggtgtactggctaatgtatttatcaatcgcgaggcggaaatctataacgaaaacgccagcaaagccggtggttgggaaggtactcgcgatttccgcattgtggctaaaacaccgcgcagcgcgcttatcaccagcttcgaactggagccggtcgacggtggcgcagtggcagaataccgtccggggcaatatctcggcgtctggctgaagccggaaggtttcccacatcaggaaattcgtcagtactctttgactcgcaaaccggatggcaaaggctatcgtattgcggtgaaacgcgaagagggtgggcaggtatccaactggttgcacaatcacgccaatgttggcgatgtcgtgaaactggtcgctccggcaggtgatttctttatggctgtcgcagatgacacaccagtgacgttaatctctgccggtgttggtcaaacgccaatgctggcaatgctcgacacgctggcaaaagcaggccacacagcacaagtgaactggttccatgcggcagaaaatggcgatgttcacgcctttgccgatgaagttaaggaactggggcagagtctgccgcgctttaccgcgcacacctggtatcgtcagccgagcgaagccgatcgcgctaaaggtcagtttgatagcgaaggtctgatggatttgagcaaactggaaggtgcgttcagcgatccgacaatgcagttctatctctgcggcccggttggcttcatgcagtttaccgcgaaacagttagtggatctgggcgtgaagcaggaaaacattcattacgaatgctttggcccgcataaggtgctgtaatttgatgttgccggatggaaacatccggcaacccttgacgcggtttaaattgccgcgtcgtcctcttcaccggtacggatgcgaatgacccgtgccacgtcaaagacgaagattttaccgtcaccgattttgccggtttgcgccgtgcgaataatggtatcgacacaggtatcgacaatgtcgtccggtacgacaatctcaattttcactttcggcagaaaatccaccatatactccgcgccgcggtacagctcggtatggcctttctggcgaccaaagcctttcacttcggtcaccgtcatgccggtaataccgacttcggccagtgcttcgcggacatcgtccagcttgaagggttttataatcgcatcaatctttttcatgctattccttgaaaaggtcgcctgtcttttgatctgctaaacgtaacacataacgccaattcattccttgaaatcgtttgcatccagctcgtgtcgggaaagcagtttataaaattctgtccggttgcgccccgccattctcgccgcgtgggtgacgttgcctttggtgatttgcagcagcttacgcaaatagttgagttcaaactgattacgtgcctcaacaaaggttggcagcgccgtattttcaccctccagcgcctgctccaccagcgcatcactaatcaccggagaactggtcagcgccacgcactgttcaatcacgttgaccaactggcgcacattacccggccagctcgcggtcatcaggcgtttcatcgcatcggtagagaacgcgcggacaaacggtttatgtcgctctgccgcctggcgcaacaggtgatttgccagtagcggaatgtcttctgtgcgctccgccagtgccggaattttcaggctgacaacgttgaggcggtaatagagatcttcgcggaattccccgcgcgccatcgcttttggcagatcacggtgagtggcagaaataatccgcacattgatatcaatatcgcggttactgcccagcgggcgcactttacgctcctgcaacacgcgcagcagtttgacctgtaacggcgcaggcatatcgccaatttcatcgagaaatagcgttccgccttccgccgcctggaataaaccttcgcgattgctgacagcgccagtaaacgcgccacgcgcatgaccaaacagctcgctctccagcaattgctcgggcaatgcgccacagttaatagcaataaatggtttgctgttgcgcgggctggcgttgtggatagcctgggcgaaaatctctttcccggtgccgctctgaccgttaatcaaaacgctgacgtcactttgcgccaccagccgcgcctgttccagcaaacgcagcatcagcgggctgcgggtgacaattgcctcgcgccagcgttcatcggtggctggcgcggattgctccagcgcatcgtcaattgcctgatatagcgcgtctttgtcgacaggcttggtgaggaaactaaaaacgccctgctgtgttgcagcaacggcatcgggaatagaaccatgcgcggtaagaataattaccggcattcccggctgcactttctggatttcagcaaacagctgcataccgtccatttcatccatccgcaggtcgctgatgactaaatctactttttcgcgattcagtacccgtaatccttcagcgccactttccgccgtgaccacactgtagccttcgctggtcaggcgcaggccaagcagtttcagcaatcccggatcgtcatcgaccaataataaatgcgcaggtttatggctcatcaggagtgacctcatgggtggatggcgcgggcttttcactctcgtgcggcgtatccgggctgaaatttccagccggtttgcgggtgctgagctggcgttcaatatcggtcaggttttccagcttgcgggtggtgagttccagttgctgctgtagaacgtgatgttgctggcgcaatgtatccagctcgctgtcgctggactgctggagtttactgtaacgttggcgctcttccgccagttgcagttgcagcgcctgaccatcgcgccagagttgatacagtgggcgaacctgtgccgggatctcggtacttaacgcttcaatacgcgcgaccagctggcggcgctcatacggcgtaattttggcgtcggcgagcaaaatcccttgtttaaaggtattttgccagctgccgtcgtcatattggcgagcttgctgacggctctgcgcaggcattaaacgatcagcacaatccatcgcccgcagccagtaaagcggattggtttcggtacttttaccttgcagcgcccagatgtcgctacattcagtagaaagatagtcagccagttgataaaccggaattttttcttctgctggcgtatcaatggctggcttattgtgattctgcacgcaacccagcaatgccagacatggcagccctgccagccacagccgtcggggcaataatcgttgaaaaatgtgtcgcatattcaccagacttaaagcctatcccagtgggcgtaattgttgcagacagtctggacatggacagcgcggagaaaccggagcgtacatatcgtacgtgaagatttcgagcactgcccggggccgaactgacaaataaaatagcctgataggataggctgttagcattatttcgtgtttttgctgctcggtaattcaatgcggaaacaaacgtcttgcccgctctcgtcgaccagatacagttccccttgcatacggcgaatacaatccctggcaatgcttaatcccagaccgctgcccttcaccgccccttttcgctggtggcttccctgaaaaaagggttcgaagatcatggcgcgttcctcttgcggaatgggcgtgcctgtattgatgacatcaatataaacccgcgcaccatgtaaactgctgcgaaggcaaatgttaccggattcagccccgtagtgcaccgcattggagtaaagattatccagtacgctcatcagcagcattggctccgccaggcaagctgttgctttgagatcgacgtcggtatgcatcattttagcccgtgcgggcaggctatgagcagaaaccactgtctccaccagcggtgctaactcaacattctccagttccaccgcactgtccgcctgtttacggttgtaatcaagcagttgttcgatcagtttttgcaaattgcggctgctgctatcaagaatgctcaccacctctttttgctctggcgtaagcggcccgacaacctggtcagccagtaattcagtgccctcgcgcatactcgccagtggcgtttttaattcatgagataaatgtcttaaaaattgatggcgttgggattccagccaactcaggcgctcacttaaccaaagaatacgttgcccaacgctgcgtaactcgctcggtccactgaagctgacgctattgcccagagaacgcccttcccccagacggttgatcatgcgctcgatatttttcaccggcccgataatcatccgcgtgaaaagcagtaccattaccagactcaccagaaatagcaccaggctttgccaaccaaaatattgcccacgttcggcgatttcacgctgaagctgctgcccacgagagaacaccactgtgcgcgtggcctgtaccatttcggtattggcactggcaaaggcttcaagacgtgcggcggcggcagcatcgggaccgctgttgttacactgaagttgagccagattgtgcaaatcctgacgtaatgcctggtagagtttatcgtccggcagcacgcctgcgtgggcatcgagcatttcgctgtaacgcttgcgctggctttgataaaccttcgccagggttgggtcgtccagcacgcaatactgacggtaactacgctccatctccagcgccgcgttggtcatcgcttcactgcgccgggcatcaataagcgtagtgcggttaaccagcgccgcctgatcgctaagcgcattcaggctttgccaggcttgccatgccagcaccaacaggggcagcagaatcagcaaaaatgccagcattaccagttgtcgtaaactgcggggaaaaacgggccagcgtttcaaggtgttactctcgtcagacgcgaatagcctgatgctaaccgaggggaagttcagatacaacaaagccgggaattacccggctttgttatggaataaggcggtgcctaactcgacgtttcgcccgatggttgatatagctacgctgatatcagaagttggacggcaggcaccttgttgtgcgtcattcgtattttatgtagcacgtcccgaaggggctgacataagtcggtgaatgagccactggttactattatgcagtaactgtgccaataaagaaaatagtttggtaacgtactgattatacgttgctttgaggggtttatgtctcctccgctgtttgaatgtaaatcagccactgtgtcgctaaaaagagacaacttaagataaacttattagataatattaaaatcaatgagttaagtgtcgccagaaagcgacacggcaaaccacccattgtcgtgatttacagacacaaaaaagctcccggagttgggagcttatgatagtggttggtgcttaatgccgcatccgggctgcaaaaccaatgggctgacgacttaccccaactgcttacgcgcattgcggaaaatgcgcatccatgggccatcctcgccccagttttccggatgccaggagttgctgacagtacggaaaacacgttccgggtgcggcatcataatggtgactcgaccactttcagtcgtgactgccgtaataccgttcggactaccgttcgggttagccgggtaggtttcagtgactttgccgaagttatcgacatagcgcagtgccaccagccctttgctttccagtgccgccagatgcgccgcatcacgcacttccacgcgcccttcaccatgagagacagcaatcggcatttggctgcccaccatcccctgcaacagcagagacgggctttgggttacttcaaccaggctgaaacgcgcttcaaagcgatcggaggtattgcgcacaaaacgtggccacaactcactacctgggatcagttcacgcagattagacatcatctggcaaccgttacatacccccagcgccagcgtttgcggacggtggaagaaggttgcaaactcatcgcgtacacggtcattgaacaggatactcttcgcccaaccttcaccggcacccagcacatcaccgtaggagaaaccaccgcacgcgaccagggcgtggaaatcttccaggcccgtgcgtccggtcagcaggtcactcatatgcacgtcgatagcatcaaagcctgcacggtggaaagctgccgccatttcaacatggctgttcacgccctgctcacgcagtacggcaactttcggacgtgcgccagtggcaatatacggtgctgccacatcttcgttgatatcgaagctcagttttacattcaggcccggatcggcgtcgttagatttcgcctgatgctcctgatcggcacactccgggttgtcacgcaggcgctgcatctgccaggtagtttctgcccaccagacacgcaacgtggtgcggctttcgctgaatacagtctgcccgttggcggtaatcacaaaacggtcaccggaaaccgcctgccctacataatggacacaatcagcaagcccatgctgtgccagtacggactcgaccgcttcacggtcagcggcacgaacctgaatcaccgcacccagttcttcgttaaacaacgccgccaggcgatcgtcacccagagtggcgatatccgcgtcaatgccacaatgaccagcaaaggccatttccgccagcgttaccagcaggccgccatcagagcggtcgtgatacgccagcagcttacgctgtgcaaccagcgcctgaatcgcgtcatagaagcctttcagttgcgcgacatcgcgtacatctgccggtttgtcgccaagctgacgataaacctgcgccagcgccgttgcgcccagcgcgttattgcctttgcccaaatcaatcagcagcagtgcgttatcttcggtagaaagctgcggcgtgatggtgtgacgtacatcttccacgcgggcaaatgcagaaatcaccaggctcagcgggctcgtcatttcgcgctcttcgttaccttcctgccagcgggttttcatgctcatggagtctttacccaccgggatcgtcaggcccagcgccggacaaagctcttcgcccacggctttaacggcttcatacaggcccgcatcttcaccagggtggcctgccgccgccatccagttggcggaaagtttgatgcgtttgatatcgccaatttgtgttgcggcgatgttggttaacgcttcaccgaccgccagacgggcagaggcggcgaaatccagcagcgcaaccggcgcacgctcgccaatcgccatcgcttcaccgtagtagctgtcgaggctggcggtagtgaccgcgcagttagcgaccggcacctgccacggccccaccatctgatcgcgcgctaccatgccggttacgctgcggtcgccaatggtcaccaggaaggttttttccgccacagtcggcagatgcagcacacgtttcaccgcgtctgcaatggtgatcccttcacgggccagcgcgtcgcctttcgctttcagcgtttgtacatcgcgggtcatcttcggcgttttaccaagcaggacgtccagcggcagatcgatcggctgattatcaaaatgacgatcgtgcagagaaagatgcagttcttcggtcgcttcaccaatcaccgcgtagggtgcgcgctcacgcttacacagttcgtcaaacagcggtaattgatcggcagcaaccgccagcacgtagcgttcctgggattcgttacaccagatttccagcgggctcatgcccggttcgtcgcttagaatctcgcgcagttcaaatttaccgccgcgcccgccgtcgctcaccagttccggcatggcgttagaaagaccgccagcgccaacgtcgtggataaacaggattgggttggcatcaccaagctgccagcaacggtcgatcacttcctggcagcgacgctccatctccgggttgtcgcgctgtacggaagcaaagtcgaggtcggcatcagactgaccagacgccatagaagacgctgcaccaccgccaagaccgatgttcattgccgggccgccgagaacgaccagcttcgcaccgacgttgatctcgcctttttgtacgtgatcggcgcgaatgttgccgatcccgcccgccagcatgatcggtttgtgataaccgcgcagctcttcgccgttgtggctgttcactttttcttcataagtacggaagtagccgttcagtgccggacgaccaaattcgttgttaaacgccgcgccgcccagcgggccttcggtcatgatgtccagcgcggtgacaatgcgctcaggcttaccgaaatcttcttcccacggctgttcgaagccaggaattcgcaggttggaaacggagaaaccaaccagacccgctttcggctttgcgccgcgcccggtggcaccttcatcgcggatttcaccgccggaaccggtcgccgcgcccggccacggagaaatcgccgtcgggtggttgtgagtttcgactttcatcagaatatgcgccggttcctgatggaaatcgtagcggcccgtttcgtggtcagcaaagtagcggcccacttcagaaccttccattacggcggcgttatctttataagcagagagaacgtgatctggcgtggtttcgaaagtatttttgatcatcttgaacaggcttttcggctgctgttcaccatcgataacccagtcggcgttaaaaattttgtggcggcagtgctcggagttcgcctgggcaaacatatacagttcgatgtcgttcgggttacgaccaagctttgtgaaagcatcctgcagatagtcaatttcatcttccgccagagccaagccaagacgcaggttagcgtcgatcagcgcctgacggccctgccccagcaaatcaacgctggtaaccggagtcggttgatggtgggcaaacaactgctctgcatcatctaaagcaaaaaagaccgtttccatcatgcggtcgtgcagttcagcggtaacctgctgccattgttcattggtcagcgtaccggcttctatatagtaagcaacgccgcgctcaaggcggtttacctgttgtagcccgcagttatgggcaatatcggtcgctttgctagaccagggagagatggtgccaggacgcggggtcaccagcaggagtttgccttgcggggcgtggctggcgagtgccgggccatatttcagcaggcgttcaagttgtgcgtgctcatcatcgtttaacggcgcattgaggtcagcaaaatggacatactcggcgtaaatattgtgaaccgggagcctggcagcctgaaaacgtgccagcagtttgttgattcggaatgcgctcagtgcagggctaccacgcagaatttccatcataagtctctcgtcttctaagctttcggtgtacccaagggggggaaacgggcgtcattataaagaatctgatgcgctgacgaaaccgtttgcgtggaaataaaatcaccatcgtgaattagcaacgcgtgccgccaatggctgtaataagttgccatctggcgcaggtttacgcaaaatgccgctcatttatgagtaaacctttcactattattacgttttttcaagctgggacgcgcacgacacagagaattaactaattgaaaaaattaaagattaattatctgttcatcggcattctggcactgctgctcgcggtcgctctctggccatccattccctggtttggtaaagccgacaaccgtatcgccgccattcaagcgcggggagagttgcgtgtgagcaccattcatactcccctgacttataacgaaatcaacgggaaaccttttggcctggattacgaactggcgaaacagtttgccgattacctcggcgtaaaactgaaagtgaccgtgcggcagaatatcagccagctgtttgacgaccttgataatggtaacgccgacctgctggcggcaggacttgtctataacagtgagcgggtaaaaaattatcagcctggccctacctattattccgtgagtcaacaactggtttataaagtgggtcagtatcgcccacgtacgctgggcaacctgacggcggagcaactcaccgttgcaccgggtcatgtggtggttaacgatctccagaccctgaaagaaacaaaattcccggaattaagctggaaggtagacgacaaaaaaggctctgcggaattaatggaagatgtcatcgaaggaaaactcgattacaccattgctgattctgtcgccatcagcctgtttcagcgcgttcacccggagctcgccgtagcgctcgatatcaccgatgaacaaccggtgacttggtttagcccgttagatggcgataataccctttccgccgccctgctcgacttcttcaacgaaatgaatgaagacggtacgctggcacgcattgaagagaaatacctggggcatggcgatgattttgattacgtcgatacgcgcacatttttacgcgccgtcgatgcggtactgccgcagttaaagcccctgtttgagaaatacgccgaagaaattgactggcgtttgctggccgctattgcttatcaggaaagccactgggatgcacaggccactagtccgacgggtgtgcgcggcatgatgatgttaaccaaaaataccgcgcaaagcctcggcattacggatcgtaccgatgccgaacagagcatcagcggtggcgtgcgttatttgcaggatatgatgagtaaagtgccggaaagtgtgccggagaacgagcggatctggtttgccctcgctgcgtacaatatgggctatgcgcatatgctggatgcccgcgccctgacggcaaaaaccaaagggaatcctgacagttgggctgacgcaaaacagcgtctgcctttacttagccagaaaccctattacagcaagctgacttacggctacgctcgtggacatgaagcctacgcttatgtcgaaaatattcgtaagtatcagattagcctggtgggttatctgcaagagaaagagaagcaggctacagaagcggcgatgcaactggcgcaggattatccggcggtaagccctacggagttgggcaaagagaaatttccttttctcagctttctttcccagagcagtagtaactatttgacccattctccctctctgctgttttccaggaaagggagtgaagagaaacaaaattaatccgtgctggattgcgcttttttctgcgctttaatttcctggcggcgcatgcgaaagaagtcactgagcaacgccgcgcactcatccgccagtattccttccgtaatttccactcggtgattcatacccggatgatgcagcacatccattaaagatcccgcagcgccagttttcgcgtcacgcgcaccaaagaccacgcgaccaatgcgactgtggatcatcgctccggcacacattacacatggttcaagcgtgacatacaacgtggcgtcgatcagacgataattttgcatcaccagaccaccctgccgcagggccatgatttctgcatgtgcggtgggatcatggcgaccaatcgggcggttccagccttcgccgattacccgattgttatgcactaataccgcgccgaccggcacttcccgctcatcccaggcacgtttcgccagcgtcagcgcgtgacgcatccagtattcgtggctaaattcgacttcagacaaaaagaaaactccggttataaaagcgcggcgcattatacacggacgctatgctttactttattccagttgctggagttcaccgcgcggggttactcgccaacgatgctgacagaaataaagcagcggattgtcctgattactgtcgctatagccactgtacagccgcagcggagtgccgattttgcgctccagttgtgcgaccttttcatgtcccagacaacgcatcgtcaatacccaaccaccatagccacgctgaatttggctggcgataagattaacccgcggcagccagggcgtatcgaaataaaccgcttcaaccagcggctgcggagagccggtaatcaaccagatatcagcatcggaacttaacaggtaggtggttaatcgctcctgaaccagcggaaaggcggtaacattgtcgcgaaaccagcgcacgaaatcggcctgcaacgtctgtaaacgtgcttcgctgtgaccaaaagtgcacccccacagaagcagactcatcggccagcgtgccgcacgaccttttatcaataacgcaatggctataatcggtaacaacggcaggacaagtaacgcattcagcggttggcgacgtagtaaatagcgcagaaaactgccgaacatatcctgctgatgcaatgttccatctaagtcaaaaaacaccacacgacgctcgtgagttgccaaaccatattcctctggactgaaacatcctgattaattttcgctactacatagcctaacagatagatcatcacttttccggcaacaatcgaccgcatcatggctaactggaatttttaattcatggcaattagcggcaatggaatataaaattcactcgcgtgtgtctcatattgcctgttgtcgccactatttcatcgcgaggaaagatatgaacggcttacttcgtatccgtcagcgttaccaggggcttgcccagagtgataaaaaactggcggattatctgctgctacaacctgatacggcgcgccatttaagctctcagcaactggccaacgaagccggagtcagtcagtccagcgtcgtgaagttcgcgcaaaaactcggctataaaggttttccggcgcttaagttggcgttgagtgaagcgctggcaagccagccggaaagtccctccgtgcccattcataaccaaatccgcggtgatgatccgttacggctggtcggcgaaaaactaattaaagaaaatactgccgctatgtacgcaacgctaaacgttaatagtgaagagaaactgcatgaatgcgtaacaatgttgcgctctgcgcggcggataattctgaccggtattggcgctagcggtctggtggcgcaaaactttgcctggaagctgatgaagattggcttcaatgctgccgcagtgcgcgatatgcatgcgctactcgcaacagtacaggcgagctcccctgacgatctgttattagccatttcctacaccggtgtacgacgcgagttaaacctggcggcagatgagatgctgcgagtgggcggaaaagtgctggcgattaccggctttactccgaatgccctgcaacagcgtgcttctcattgcctgtataccattgccgaagaacaagcgacaaacagtgctagtatctctgcttgtcacgctcagggaatgttaacggatttgctgttcattgcgctgattcagcaggatctggaactggcaccagaacgtattcgtcatagtgaagcgctggtgaaaaaactggtctaagtaaagaatgcgcgtataatgcccgcccggtttgtgttgttttgagagtttccttatggcgttgttaatcactaaaaaatgcatcaattgtgatatgtgtgaacccgaatgcccgaatgaggcgattagtatgggagatcatatctacgagattaacagcgataagtgtaccgaatgcgtagggcactacgagacaccaacctgccagaaggtgtgcccgatccccaatactattgtgaaagatccggcgcatgtcgagacagaagaacagttgtgggataaatttgtgctgatgcaccacgcggataaaatttaatattctactctggaagtagagtattaattatattactgggaagccttaacgccattatatttatttaattgatgacattagcataatcattcactaagttaatttatatagtatctgcccagacacttatttatagttattaaaggtgcgtccgactggttcaccggacgcaccttaagtacgtttccttgtgttataagaacagaaggatcagctgtaaaacagcaatgatgattttgatgacccgtttaatcaggtatcggcaatcagtcattcgtttttccttaaacaaggaatgcagccattcagattagcccttacatctccccaaaactgaacgtgcgagttattgagggtgcatgctgcactccacaccagagctttgacgacaccactcgtttcaatgggggaattctgtggcatggtgtaaagcacagcaaaatcttcaataacgaagccaattttaatgtacttacgaattggcggtcacgttaatctttccatcaatattgctttcttcgtaaaggctcgagtttttatgctaaagattgcaagttgcttgtaaaagataagtacactgatccataatcgctgttgttgagggtgcatgctgcacaaaattaaagttaaaaagtaaaacccccgttccttaccagttcgggggttttactttttaaagagaacggtattatttttaactttcaataattaccgtggcacaagcatagtgccgctcatctgccagcgttacatgcatatttgcaacgcccagcttttccgccagttttaatgcctcgccccatagccgtagccgtggtttgccgagctcatcattgaatacttcaaattgattaaacgccagaccattgcggatcccggtgccaaacgcttttgctgcggcttctttcacagcaaaacgcttcgccagaaaacgcaccggctggtggtgcgttttccagatagcccattcgttatcgcttaatacgcggcgtgccaggcgatcaccggatcgggcgatcaccgcttcgatgcgagcgatctccacaatatccgtgcctaaacctaatattgccattagccacgcgcttccagcatcagacgcttcatttctgccaccgcatctttcagtccggtcatcactgcacgaccaataatggcatgaccgatattcagttcatgcatctcagggatggcggcaatggctttcacgttgtgataggtcagaccgtgtccggcgttaactttcagaccgaggcttgcggcaaaggtcgcggctttggcgatacgcgccagctcttgcgcctgttcggcgtcagttttggcatcagcatagcaaccggtgtggatctcgataaacggtgcgccaacctctgccgcagctttgatctgctcttcatcggcgtcaataaacagagaaacctgaatcccggcatctgccagacgtttgcaggcatcgcgcattttgtcacgctgccctgcgacatccaggccgccttcggttgttacttcctgacgcttttccggtaccaggcagcaaaaatgtggcttcgtctcaacggcgatcgccagcatctcttcggtcaccgccatctccagattcatgcgggtatccagcgtctgacgcaggatgcgcacgtcgcggtcagtaatgtgacggcgatcttcacgtaaatgcacggtaatgccgtccgctcccgcctgctcggcaataaacgcggcctgcaccggatccgggtaagcggtaccgcgcgcgttgcgcagcgtagcgatatggtcaatgttgacgcctaacagtaattcagccatgacaatcctcatcattcataatgtgttttcaccgttcgcttaggcataaactgccggaacagttccctgctctttaaaggtttaccgccaagatacggcttaagcgccatgcgggtaaagcgtttcgcggcgcgcagtgtgtctgcgtcaggaaattcccgtgcgtttaacgcttttaactgccttccggtgaacgttttattgtcgataacgacgcttgcgataaaccctttttcttcgcgataacgatacgtcatggtgtcatctaccggctcgccgctacccgcacaatgggtaaaattgacgccataacccagatgcccgagcagtgccagttcaaagcggcgcagcgcgggttctggcgtaccagtgacccctgcaagagactgaatgcagtgcaagtaatcgaaaaaaagttcagagaagcgcgtctcgtattccagtacgcgggagagaagttcgttgatgtacagaccgctgtaaagcgtgataccgcttaatggcagcgccaggctgacggcttcagcactgcgcagcgttttgacttcgccacgcccgccaaaacgtagcaagagaggggtgaaaggctgtaatgcacctttcagggtagagcgtttagagcgtgcgcctttggcaaccagacgcacgcgcccgctttcctccgtgaagacgtccagcatcaggctggtttcgctccacgggcgactatgcaggacaaatgcgcgctgccagccttccatcggagttactcttaaagatcgtcaacgtaaccgagactgcgcagtgcgcgttcgtcgtcggcccaaccggatttcacttttacccacagttcaaggtgaacaggcgcttcgaacatttcctgcatgtctttacgcgcttcaatcccgatggttttgatcttggcccctttgttgccaatgaccatcttcttctgcccttcacgctcaacgagaatcaaaccgttgatgtcataaccaccgcgttcgttagagacgaaacgttcgatctccacggtcacggagtacggcagttcagcgccgaggaaacgcatcagtttttcgcggatgatttcagacgccataaaacgctgactgcgatcggtgatgtaatcttccgggaagtgatgagtcgcttcaggtagatgcttacgcacgattgccgcaatagtgtcaacattcagcccggtttcggcagagattggcacgatatcgaggaagttcatctggcttgccaggaactgcaggtgcggcagcagatcggctttctcctgcacgttgtccactttgttcaccgcgaggattaccggcgctttgccttcgcgcagtttgttgagcaccatttcgtcgtccggcgtccagcgggtgccttcaacgacaaaaatcaccagctcaacatcgccaatagagctgctcgccgctttgttcatcaggcggttaatggcgcgtttttcttccatatgcaggcccggtgtatcgacgtagatcgcctgatacgcgccttcagtatggatccccacaatgcggtgacgagttgtctgcgccttgcgggaagtgatggagattttctgccccagcagtttgttcaacaatgtggatttgccaacgttcggacgtccgacgatggcaataaatccgcagtaacttttatcgatgctcattccagctccagttttttcaacgcctgttcggcggcagcctgctcagccttacgacggctactacctgtgccaaccaccggttcactcaggccgctgacctggcagtggatagtaaattcctgatcgtgcgcttcgccacgtacctggactaccagataagtcggcagcggcagatggcgaccctgcaaatattcttgcaagcgcgttttcggatctttttgtttatcgcctgggctaatttcgtccaaacgagtttgataccagttgaggattaatttctcgacggtttgaatatcactgtcgaggaatacgccaccaattaatgcttcgacggtgtcggcgagaatactctcacgacgaaatccaccgcttttaagttcacctggccctaaacgtaagcactcgcctaactcaaattcgcgcgccagttccgccagcgtattgccacggaccagcgtggcgcgcatccggctcatatcgccttcatccacacgagggaaacggtgataaagcgcattggcgataacgtagctcagaatagagtcgcctaaaaattctaaacgctcgttatgtttactgctggcactacgatgagttaatgcctgctgcaacagttcctgatgattaaaagtgtagcccagcttccgttgaagccgattaattacgatggggttcatgcgataccaataaataaatgcgtcaacaattcagcacacgaaacagacctgatatacatggttctgctaactgcttcgctgcagtttcagtttaccggtatatggggaccaacgctgtttcgtgtgccgtggcaacctggaggtgccaaccttaaacttcgggggaatattctatacacaacgacgggggatgtcgttagccacgggagatttatctcataaataattcacgttgtcgccataacggcgacaacgtgaacgaagatggctattaatggatgccgccaatgcgacttaagcgcagaccagtcggccattcgccttcttgcttatcgaagctcatccagatagccgttgcccgaccgaccagattcgcttccggcacaaagccccagtaacggctgtccgcgctgttgtcgcggttgtcgcccatcatgaagtattgtcccggaggaacaatccaggttgccagttgttgccctggctgctggtaatacatccccacctgatcctgcgcaatcggcactgtcagaatgcggtgcgtcacatcacccagtgtctctttacgctcggaaagacgaattccattttctttggtttcgtttttcggcacttcaaagaatccgctggtcgcttccccaccattacggcgactgaaggtctgaacgaaatcgctcggttccacgttactgtaggtgaccggcagcgcgttttcacacgcctggccggaactgcatcccggttgaatcgtcagctctttactgaccggatcgtaagtgactttatcgcccggtaaacccaccgcgcgcttgatgtaatcaagctttggatcttccggatatttaaagaccacgatatcgccgcgtttcggatgaccggtttcgatcagcgttttctggtagataggatctttaatgccataagcaaacttctctaccagaataaaatcaccaattaacagagtcggcatcatgctaccactcgggatctggaacggttcataaataaagctacgcacaatcaatacgatagccagtaccggaaaaacagaagcaccggtttccagccagccaggcttcggcgcaacctttttcaacgttgctttatccagactgtccccggcagccgcctgcgccgctgcctgacgttcccgccgtttaggtgcgaaaaagaatttatccacgcaccataaaatgcccgtcaccagtgtggcaatcaccagaatcagggcaaacatattcgccatgccaactcctaagggttatttgttgtctttgccgacgtgcagaatggcgaggaacgcttcctgcggcagctcgacgttaccgatctgcttcatgcgtttcttaccttctttctgcttctgcagcagctttttcttacggctgatatcgccgccataacatttagccagtacgtttttacgcagctgtttcacggtggatcgcgcaatgatgtgcgtaccaatcgctgcctgaatggcgatatcaaactgctggcgtgggatcagatctttcatcttctccaccaactcgcgaccgcggttttggctattatcacggtgggtgatcaacgccagcgcatcaacacgttcaccgttgattaatacgtctacacgtaccatgtcggacgcctggaagcgcttgaagttgtaatccagagacgcataaccacggctggtagatttcaggcgatcgaagaagtcgagcaccacttccgccatcgggatctcgtacgtcagcgccacctgattaccgtggtaaaccatattggtctgcacgccgcgtttttctacgcacaacgtaataacgttgccgagatatgcctgcggcagcagcatgtgacactctgcaatcggctcgcgcagttcgtagatgttatttaccgcaggcagcttggatgggctgtcgacgtagataacttctctactcgtggtttcaacttcatacactacggtcggcgcagtggtgatcagatccagatcgtattcacgttccagacgttcctggatgatctccatgtgcagcaggccgaggaagccgcagcggaaaccaaagcccagcgcgctggagctttccggctcatagaacagactggcatcgttcaggctgagtttacccagcgcgtcacggaaggcttcatagtcgtcggaacttaccgggaacagaccggcgtatacctgcggtttgactttcttaaagccaggcagcgccttttctgccggattacgcgccagcgttaaggtatcgccgactggagcgccgtggatatctttaatcgcacatacgagccagcctacttcgccacatttcagttcagtgcggtcaacctgtttcggcgtgaagatgcccagacggtcggcgttataggtctgcccggtactcatgactttcactttgtcgcccttacgcagggtgccgtttttaatacggataagactaacaacgcccaggtagttgtcgaaccaactgtcgataattagtgcctgcaacgggccttccggatcgccttccggcggcggaatgtcgcgcaccagacgttcgagaacgtcctgcacaccaacgccggttttcgcactacagcgcaccgcgtcggtggcgtcgatgccgacgatatcttcaatttcttccgccacgcgttcaggatcggctgccggcaggtcaatcttgttcagtaccggcacaacttcgagatccatttccatggcggtgtagcagtttgccagggtttgcgcttctacgccctgcccggcgtcgaccaccagcaatgcaccttcacaggcagccaggctacgggaaacttcataggagaagtctacgtggcccggggtgtcgataaagttaagctgataggtttcgccgtcagacgctttgtagtccagcgtcacgctttgcgctttgatggtaatgccacgctcacgctcaagatccatggaatcgagaacctgcgcctccatttcacggtcagacaggccaccgcagatctggataatacggtcagacagcgtgcttttaccgtggtcaatgtgagctatgatgctaaagttacgtatattcttcataaagtatgattattgtgccttaatgcccggttaaccaggcttttagaagtcgctgttctgagcttaacgtctgtattaatagaaacgccgcattctacactacaacattgaggcgaggaaatgttcataccgtatggattgtggtatctggaaacgtcctcgcatttgttatgcaaaatgcaacaaagccagtgaaatcactggctcgcgtcttcgctagatgtttcaaatcgcacaaggccaggcggcaatgccacgcttaagatgatcggttgccattctgcccgggcagcaaacttacggctgtagccgcgcgcaatcaggaacccgccaataccaccgaggatcgcaccacataatgctgcgacgtcagaagcaaagagtagctgaaataggctagcgataaggaataatcccaccagcgggctcatataaaccagtaatgcggagctaagcaggctgccttcggcgatccccaattccactttttgccccggcactaacggctcatcacagggtacgacaatggtatgcgtggtttgcgggccaagtttatttaacacgcggctaccgcaaccggcgcgactagcgcagctgctgcaactagctttaacatcacaactgaccagcgcctgcccgttttgccaggagacgacggtagcccactctttgatcattgcgctgccccgaacttaatattctcggcaatgcgtttcgccgtttgcggcggcagttcaccgacaatggtgatttcggcgttatcacgtacgcttgtactgacggttctgcgtccggtgcgcaacatctgatcggtgctgcttggcgtagcgcggttaacgtttacgctgaagctgaataatccgtcggaatagagacgactttcgataggcatgttgtccatcgtcggtagcggacgtcgactactggaaacttcgctaaaaccctgtggcaaccaggttggcgtccagctgaatttagctttttcacctacaggaacagaaagcaacggcggcaaatttgccttcgccagcgtctgcatactgctgctgatatcctgattgacgttaaaagcaatcacgcgaaattgttccagcgtttcaccatcgcgatcaaggagatcaacccgcatcggtaatttgctttcggtgtccatccacacgatgtagctgtagcgtgtaccatctcgggcaaccacgcgaatgacttcgcaaagacgatcagcaatacgcgtgcgcccgacggagataaagtcgtagtaaggagaaaggcgtttgaaatcggtatagataaggcttggcagagaatcaacaatgtaatcgccattaagcgtgaacggttcaagtcccggttcaaaatagctgatttcattgccgcgctgtaccacttcccggcgcgggccatccatttgcaacaattgtgcaagaggacggttatcgaggcgtgcatgtcgataacgcagagactcaacaccctgtttattgatgctgatgaaactcagctcgtaattcagactctgactggccaggttcatctgctgtaataacgccccggacgcgggagtggcgctggcgttagcagagaataacaggctacctgtcactaaactcatggcaaaccaaagttgcttcattactggctttgcgttcctaaagtttgaattcctggcacctgtacagcggcttgctgggtttgcgcctgctcaaactgaagctgttcagagtggagtcggcgttgcagttcgtaatcctgcaacattgcattaatgcgacgacgctgctcctgtacctgctgctgttgaccattgtttgcggtcgcttcagaaggtactcccaggcttaccgggctggctttacccatcatcggcagtgtattaaataccggcgtttcgggctgctgggacgtttcagattgtccattatagtgctggacgccaacgataactgcaaggcttacgcatgcggctacgcccatttgggtaagctgtgccgcccacggacgtactttctgccagaatggcattttctgccattgatgcggcgcaggctgggcttccgggatcaatgtcgccggttgacgtactggctcttcttcaatggcggccatcacgcgactagagatatcgaaatggagcacctcgggagtatcaccccgcatactgtcacggattaagtgatagctttcccaggttttctgcatttctgggttatgagccagttcgttaagcagctcactatccagcgtttcgccatccattaaagcggaaagttgttctttctgcatgcctaatacccttatccagtatcccgctatcgtcaacgcctgataagcggttgaactttgttatcaatagcttccctcgctcggaagatacgactacgcaccgtacctaccggacaatccatgatagcggctatctcttcatagctcaggccatccagctcccgcaaggttattgccatgcgtaaatcttccgggagggactcaatagttcggaaaactatctgtctcagttcttcactcaacattaagttctcagggttgctaatttctttcaacgcgccgccactttcgaagttttcagcttcaatggcatccacatcactggaaggtggacgacgcccctgagcaaccaggtaatttttcgctgtatttacagcaatccgatacagccatgtataaaaagcgctatctccccggaagctatccagcgcacgataggctttaataaaagcttcttgtaccacatcgggaacatcaccgctcggcacatagcgggaaaccagactcgccactttatgctgatagcgcactaccagtaagttaaaggctttctgatctcccttctggacccgttcaaccaggacctggtccgttaactgctcgctcatccgaggtaaagtctccccaaaccaaatttccacgcgctatcgaaacgccactccattagctgcaatttgagcaagcaaagggttagagtgtctcgtttttgtaaagttccgtaacgcatctgtttttgtttgtcatgctgtagacggatcattatctatcattataagtctacagaatctgaacatcgcattatctgtgtagaaatgcccatttaactgcctgaagagtaacccaacggcctttttatttcaccacctaatcctccaccagccagtaacttctctttttctcgccgccctgcgtcagcgtgtttagcaactgtaacaaatattaaaatagcaggtgtttatccgcacaacatgatgctatgctgaccaaaccatgtttagtaaattaaacaaagaaaatgaatactctccctgaacatagttgtgacgtgttgattatcggtagcggcgcagccggacttagtctggcgctacgcctggctgaccagcatcaggtcatcgttctaagtaaaggcccggtaacggaaggtagtacattttatgcccagggcggtattgccgccgtgtttgatgaaactgacagcattgacagccatgtggaagacacattgattgccggggctggtatttgcgatcgccatgcagttgaatttgtcgccagcaatgcacgatcctgtgtgcaatggctaatcgaccagggggtgttgtttgatacccacattcaaccgaatggcgaagaaagttaccatctgacccgtgaaggtggacatagtcaccgtcgtattcttcatgccgccgacgccaccggtagagaagtagaaaccacgctggtgagcaaggcgctgaaccatccgaatattcgcgtgctggagcgcagcaacgcggttgatctgattgtttctgacaaaattggcctgccgggcacgcgacgggttgttggcgcgtgggtatggaaccgtaataaagaaacggtggaaacctgccacgcaaaagcggtggtgctggcaaccggcggtgcgagcaaggtttatcagtacaccaccaatccggatatttcttctggcgatggcattgctatggcgtggcgcgcaggctgccgggttgccaatctcgaatttaatcagttccaccctaccgcgctatatcacccacaggcacgcaatttcctgttaacagaagcactgcgcggcgaaggcgcttatctcaagcgcccggatggtacgcgttttatgcccgattttgatgagcgcggcgaactggccccgcgcgatattgtcgcccgcgccattgaccatgaaatgaaacgcctcggcgcagattgtatgttccttgatatcagccataagcccgccgattttattcgccagcatttcccgatgatttatgaaaagctgctcgggctggggattgatctcacacaagaaccggtaccgattgtgcctgctgcacattatacctgcggtggtgtaatggttgatgatcatgggcgtacggacgtcgagggcttgtatgccattggcgaggtgagttataccggcttacacggcgctaaccgcatggccagcaatagtttgctggagtgtctggtctatggctggagcgcggcggaagatatcaccagacgtatgccttatgcccacgacatcagtacgttaccgccgtgggatgaaagccgcgttgagaaccctgacgaacgggtagtaattcagcataactggcacgagctacgtctgtttatgtgggattacgttggcattgtgcgcacaacgaagcgcctggaacgcgccctgcggcggataaccatgctccaacaagaaatagacgaatattacgcccatttccgcgtcagtaataatttgctggagctgcgtaatctggtacaggttgccgagttgattgttcgctgtgcaatgatgcgtaaagagagtcgggggttgcatttcacgctggattatccggaactgctcacccattccggtccgagcatcctttcccccggcaatcattacataaacagataaaaagcctgggtcagcgccgtatacgcttcggaatagttctggtctggcccacgaatgactaagcgatcgctaaagcattctcccgcctgcggggagaatgccagcagcacccgatgcggcagtcgcgcttcgttttccgccacatccgtccgcaaacgtaaatgccagcccatgcttaatgccagctccgtaaaaccattaccaatctgctctggcagcactacgcagaaaaatccctcttcggtaatgcactccgccgcacaggtcagcaagcttgggtgatcaagcgtagtggtatagcgagcctgttcccgttgaggtgtgctgcactctactccctgctgatagtaaggtgggttactgatgattaaatcgaagcgtactgtctgctgtgtaatccactgctgaatatccgccgtatggacgttaatccgctctgcccacggggactggttgatattttcctgcgcctgcgcggcagcttcactttccagttcaactgcatcaatcatcacgctgtcatcggttcgctgcgccagcattaatgccagcaacccgctacccgcgccgatatcaaggcaacgttttaccccagccaccggtgcccatgcgcccaataaaataccatccgttcccactttcatcgcacagcgatcgtgagcaacaaaaaactgtttaaaagtaaatccattacgacgaagcacggatgtagactgactcatgaaaataaaaccttgcaggaaaaacggcgatagcaccgggtgagaacaatacccgagaagcgatatccatacaaacagatgaagattgcagccgtaacgtctataatcagcgccccacacagaggtagaacatgactgtaacgactttttccgaacttgaactcgacgaaagcctgctggaagccctccaggataaaggtttcactcgcccgaccgccattcaggctgccgccattccgcctgcgctcgatggccgtgatgtactcggttctgcgccgacaggcaccggtaaaacggcggcgtatctgctgccagcgttgcagcacctgctcgatttcccgcgtaagaaatccggtccgccgcgtattttgatcctcaccccaactcgcgagctggcgatgcaggtgtccgatcatgcccgcgaactggcgaaacatacgcatctggatatcgccaccatcaccggcggcgtagcctatatgaaccacgcggaagtgttcagcgaaaatcaggacatcgtggtcgccacgaccggacgtctgctgcaatacataaaagaagagaacttcgattgccgcgcggttgaaacgctgatcctcgacgaagcagaccgtatgctggatatgggcttcgctcaggatatcgaacatattgctggcgaaacgcgctggcgtaaacagaccctgctctttagcgcaacgctggaaggcgatgcgattcaggactttgccgagcgtctgctggaagatccggtggaagtttctgccaatccctccacccgtgagcgcaaaaaaattcatcagtggtattaccgcgccgatgatcttgagcataaaaccgcgttgctggtgcatctgttaaaacagccggaagcgacccgcagtattgtgtttgtgcgtaagcgtgagcgtgtgcatgagctggcaaactggctgcgcgaagcgggcatcaacaactgctatctcgaaggtgagatggtacagggcaagcgtaacgaagcgatcaagcgtttgaccgaaggtcgcgtaaacgtactggtcgcaaccgatgttgccgcgcgcggtatcgacattcctgacgtcagccacgtctttaacttcgatatgccgcgcagtggcgatacttatttgcaccgtatcggacgtaccgcgcgcgccggtcgtaaaggcaccgcaattagcctggtggaagcccatgaccatctgctgctgggtaaagtaggccgctatattgaagagccaattaaagctcgcgttattgatgagttacgcccgaaaacgcgtgcgccaagcgaaaagcagaccggcaagccaagcaagaaagtactggctaaacgtgctgagaagaaaaaagctaaagagaaagagaagccgcgggtgaaaaaacgccatcgcgacaccaaaaatattggtaagcgccgtaaaccaagcggaacgggcgtgccaccgcaaacgacagaagagtaatctcaatgccaggtttaagcctggtattaaaagtgctggcaaacgcaaaactgcctgatgcgctacgcttatcaggcctacgtggctcatgcaatatattgaatttgcacgatcttgtaggccggataaggcgttcacgccgcatccggcatgaataaagcgcactttgtcgacaagttaaatgccgggtttaatcccgacattatttttatccagccacaaaactctcttcaacacactgaataaaagtgtgcatcgccgggctaaccgcttttccagcatgatgtgcgcacatggccgtaatggtctggctctgttcgccaaaaggcaattcaattaattctccgcactccaactcttttgccaccgcaaagcgcggtaggtagctgaccccgatattcgccgcgacacaacgcttgatgctttcgatacttataagctcaatggtgttttccaccgtgatccgccgctgacgcagcgtgctctcaaatatctgccggaagacacattgcggttcgttgataataaagctacaggcgttatgtcttcccggctcagtaaaatcgacatctgcaatttgcggactagccaccagcaccagactttgttcacccaactctcgtcgattcagagcatcatcattccctacacgataaaagacgccaacatcggcctcatcattcagtagcgcatcacggatcacgtaacagttcaggctctgcaagcttaaacgcacttttggggcgcgttgccgaaaacgctgcaacacctgcggcattcggtaagagagcaacgtttcgccgctaacaacgcgtagttccccgtccggatcactctcctttttggcagcctcacgaagcgtatccatcactcgggtaagttcataaatgtgcggcagcaacttttttccttcgcgggtaaggcacatccgtcggccaattttctcaaataactggacactaaactcctgctcaagctgctgaatatgaaaagtcaccgtgctttgtgtacagcacaatttttggctagctcgcaaaaaggaaccctcttccaccacggttttaagcgtaataaaacggcgcagatccataaccccaaacctatcgaaaatatcgaatctagaatataaaaacattcatttttttaaatgttccgtgtcgggtactgtctaccaaaacagaggagataacaagtgacaccgacccttttaagtgctttttggacttacaccctgattaccgctatgacgccaggaccgaacaatattctcgcccttagctctgctacgagccatggatttcgtcaaagtacccgcgtgctggcagggatgagtctgggatttttgattgtgatgttactgtgtgcgggcattagttttagtctggcagtgattgacccggcagcggtacaccttttgagttgggcgggggcggcatatattgtctggctggcgtggaaaatcgccaccagcccaacaaaggaagacggacttcaggcaaaaccaatcagcttttgggccagctttgctttgcagtttgtgaacgtcaaatcattttgtacggtgttacggcactgagcacgtttgttctgccgcaaacacaggcgttaagctgggtagttggcgtcagcgttttgctggcgatgattgggacgtttggcaatgtgtgctgggcgctggcggggcatctgtttcagcgattgtttcgccagtatggtcgccagttaaatatcgtgcttgccctgttgctggtctattgcgcggtacgcattttctattaacgaaaaaaagcggaagaggtcgccctcttccgcttagtaacttgctacttaagccttacaggctttcagtaaaggtacgagcgataacgtcgcgctgctgttccggagtcagagagttaaagcgaactgcataaccggatacacggatggtcagctgcggatatttttccggatgcttaactgcatcttccagagtttcgcgacgcagaacgttaacgttcaggtgttgaccaccttcaacgcgaacttctggtttcacttctactggaacttcacggtattcaatgtcacccagtttgcttactgcaaccacttcatcttctgcataacctgcttttgcaacgatgcaacgcgcttcgcctttttcgctgtccagcagccagaaagagttcagcagatcgtcgttagcggctttagtaatctggatacctgtaatcatgtgatgcctccccggcaaaattatttgatttgttcagcctgtcgcggccaattggtaaaaccattgttgcttgagtgtatatatactcctcaaacacccttgaatctttgatttaaatcaataaaaaccacacatcaagtatggtcgcaaatggattttattgttttacatcaacttatgcgggtgtgaaattttaccaatttacatttttttgcactcgtttaagtctaaaaaatgagcatgattttgttctgtagaaagaagcagttaagctaggcggattgaagattcgcaggagagcgagatggctaacgaattaacctggcatgacgtgctggctgaagagaagcagcaaccctattttcttaatacccttcagaccgtcgccagcgagcggcagtccggcgtcactatctacccaccacaaaaagatgtctttaacgcgttccgctttacagagttgggtgacgttaaagtggtgattctcggccaggatccttatcacggaccgggacaggcgcatggtctggcattttccgttcgtcccggcattgccattcctccgagtttattgaatatgtataaagagctggaaaatactattccgggcttcacccgccctaatcatggttatcttgaaagctgggcgcgtcagggcgttctgctactcaatactgtgttgacggtacgcgcaggtcaggcgcattcccacgccagcctcggctgggaaaccttcaccgataaagtgatcagcctgattaaccagcatcgcgaaggcgtggtgtttttgttgtggggaagccatgcgcaaaagaaaggggcgattatagataagcaacgccatcatgtactgaaagcaccgcatccgagcccgcttagcgcgcatcgtggattctttggctgcaaccattttgtgctggcaaatcagtggctggaacaacgtggcgagacgccgattgactggatgccagtattaccggcagagagtgagtaaatttgcggggaaatgccggatggcagagttgccacccggctgatttatcaggctttattctgacgccaccattcaccaagcaaaacgccggttgcgacagagatattcagcccggcaacgttgcccgtaccgtcaatcttcacgcgcagatcgttcggatcgcgtgcggcatccggtaacccttcatattcctgacccagcaccagtaccattttcgctggcagactagttttgaacagcggtttaccctgctcgctggaagtggtcactacggtgtaacctgcctgacggaaatcatccagcacgttaacaatgttgtcgccagtaatcggctgaacgtgctctgcgccgccttctgcggtacggatagccgccccgctctccagcagtgccgcatcctgcaccacgacacctttcacgccgaagtgcgcgcagctgcgcatcatgccacccaggttatgcgggttagattcgttttccagtgccagaacgcaatcctgcgcgcctgcctggcttacccactgctgcacggttgtaccgttacgctttttgatcaagaagcaaacgccgccgtgatgttccgtgccactcgcttttgtcaattccgcttcatccaccacatggtacgctttgcggtttgctgccatccagcgcaaagcttctttaaaacgcggcgttacactctggataaaccaggcgcgaacaatcgcttccggacggctctggaaaagtgcctgacatgcattttcgccgtagacgcgggtttcttccgcacgctgacgacgcaacacttccggatcaataaaacttttaccactgatgccaccgtgatcggccttttccggcgtctcatcacccggcgcgcgggaaaccgtgcgccacgggctatcttcccacttgcggtcacggggctgactctgtttgtcatcgcgggcggggcgacggccaccgtcagcacgagattttcctggacgcccgccccctttcccggtacgcgggttgtgggtacgtttatcagaatcatcatcactgcggacatacatcactttgaccttgccgcttttacctttcatttcatcgttcatgcttttctccaccagcgctgcgcgaagcgcgcagattacccgaagtccgcgcggttcgccatgatttcgtaccaaagcctgcgactatcatacctattgaataaaacagattgttgtctggaacaatgtccccgataatatgtaacatattagaaacataccggcgtcgttgccgataagtctccttactcatcccgaggttagttatgaataccgtttgtacccattgtcaggccatcaatcgcattcccgacgatcggatcgaagatgcggcaaaatgcggacgctgcggtcacgacttgtttgacggagaggtgattaatgcgaccggtgaaacactcgacaaattgctgaaggatgatctacctgtggtgatcgacttctgggcaccgtggtgcggcccctgccgtaatttcgcaccaatttttgaagatgtcgcgcaagagcgtagcggtaaagtgcgctttgtgaaagtgaataccgaagctgaacgtgaattgagcagtcgctttggaattcgtagtataccgacgatcatgattttcaaaaacggtcaggttgtcgacatgcttaatggcgcagtaccgaaagcgccgttcgatagctggctgaacgaatctctttaatcttaccggggcgcatcttgtgccccgttttctcctctgcgacaatggcgttttttcgacgctctcttatgaccgaaaacgctgttctccagttacgcgccgagcgtattgcgcgcgcaacacgtccttttcttgcccgcggtaatcgcgttcgtcgctgccaacgctgtcttttgccagagaaattatgtctctgtagcacaattaccccagcacaagcaaaaagtcgcttctgtttgctgatgttcgacaccgagccaatgaagcccagtaataccgggcgtctcattgctgatattttgcctgataccgttgcgtttcaatggagccgtaccgaacccagccaggatttgctggagttggtgcaaaacccggactatcagccaatggtggtctttcccgctagctatgctgatgagcaacgggaagtgatcttcacaccacctgccggtaagccaccgctgtttatcatgctcgatggtacctggccggaagctcgcaagatgtttcgtaaaagtccgtatctggataatcttcccgtcatttccgtcgatctttcccggctttctgcctatcgcctgcgtgaagcccaggctgaaggccaatattgtactgccgaggtagccatcgcactgttagatatggccggcgataccggggcggcggcagggttaggcgagcattttacccgctttaaaacacgctatctggcaggaaaaacgcaacatctgggtagcatcacagcagaacagttagaaagcgtttaaaatcattcggtcacttctgcgggagaccggtatgagtcagcgaggactggaagcactactgcgaccaaaaagcatagcggtaattggcgcgagcatgaaacccaatcgcgcaggttacctgatgatgcgtaacctgctggcgggaggctttaacggaccggtactcccggtgacgccagcctggaaagcggtgttgggtgtgttggcctggccggatattgccagcttgccctttacacccgaccttgcggttttatgtaccaatgccagccgtaatcttgctcttctggaagagctcggcgagaaaggctgtaaaacctgcattattctttccgccccggcaagccaacacgaagatctccgcgcctgcgccctgcgccataacatgcgcctgcttggaccaaacagtctgggtttactggctccctggcaaggtctgaatgccagctttagccctgtgccgattaaacgcggcaagctggcgtttattagccaaagcgctgccgtctccaacaccatcctcgactgggcgcaacagcgtaagatgggcttttcctactttattgcgctcggcgacagcctggatatcgacgttgatgaattgcttgactatctggcacgcgacagtaaaaccagcgccatcctgctctatctcgaacagttaagcgacgcgcgacgctttgttagcgcggcccgtagtgccagccgtaataaaccgattctggtgattaaaagcggacgtagcccggcggcacagcgactgctcaacacgacggcaggaatggacccggcatgggatgcggctattcagcgtgccggtttgttgcgggtacaggacacccacgagctgtttagcgcggtggaaacccttagccatatgcgcccgctacgtggcgaccggctgatgattatcagcaacggtgctgcgcctgccgcgctggcgctggatgccttatggagtcgcaatggcaagctggcaacgctaagcgaagaaacctgccagaaactgcgcgatgcactgccagaacatgtggcaatatctaacccgctcgatctacgcgatgacgccagcagtgagcactatattaaaacgctggatattctgctccacagccaggattttgacgcgctgatggttattcatagccccagcgccgctgctcccgcaacagaaagcgcgcaagtattaattgaagcggtaaagcatcatccccgcagcaaatatgtctctttgctgacgaactggtgcggcgagcactccagccaagaggcacgacgtttattcagcgaagccgggctgccgacctaccgtaccccggaaggaaccatcactgcttttatgcatatggtggagtaccggcgtaatcagaagcaactacgcgaaacgccggcgttgcccagcaatctgacttccaataccgcagaagcgcatcttctgttgcaacaggcgattgccgaaggggctacgagcctcgatacccatgaagttcagcccatcctgcaagcgtatggcatgaacacgctccctacctggattgccagcgatagcaccgaagcggtgcatattgccgaacagattggttatccggtggcgctgaaattgcgtagcccggatattccacataaaagcgaagttcagggcgtcatgctttacctgcgtacagccaatgaagtccagcaagcggcgaacgctattttcgatcgcgtaaaaatggcctggccacaggcgcgggtccacggcctgttggtgcaaagtatggctaaccgtgctggcgctcaggagttgcgggttgtggttgagcacgatccggttttcgggccgttgatcatgctgggtgaaggcggtgtggagtggcgtcctgaagatcaagccgtcgtcgcactgccgccgctgaacatgaacctggcccgctatctggttattcaggggatcaaaagtaaaaagattcgtgcgcgcagtgcgctacgcccattggatgttgcaggcttgagccagcttctggtgcaggtttccaacttgattgtcgattgcccggaaattcagcgtctggatattcatcctttgctggcttctggcagtgaatttaccgcgctggatgtcacgctggatatcagcccgtttgaaggcgataacgagagtcggctggcagtgcgcccttatccgcatcagctggaagaatgggtagaattgaaaaacggtgaacgctgcttgttccgcccgattttgccagaagatgagccacaacttcagcaattcattagccgagtcaccaaagaagatctttattaccgctactttagcgagatcaacgaatttacccatgaagatttagccaacatgacacagatcgactacgatcgggaaatggcgtttgtagcggtacgacgtattgatcaaacggaagagatcctcggcgtcacgcgtgcgatttccgatcctgataacatcgatgccgaatttgctgtactggttcgcagcgatctcaaagggttaggcttaggtcgacgcttaatggaaaagttgattacctatacgcgagatcacggactacaacgtctgaatggtattacgatgccaaacaatcgtggcatggtggcgctagcccgcaagctcgggtttaacgttgatatccagctcgaagaggggatcgttgggcttacgctaaatcttgcccagcgcgaggaaagttgagtaaggtactggaaatgttgaccacttaatcgggactggtgttattattgcccgcttatgtcgtctgcattgcacagaggacccttcaatgaacagagaagaaatgcactgtgatgttgagtaaatttaagcgtaataaacatcaacaacaccttgcccaactacccaagatttctcaaagtgttgatgatgtcgatttcttttacgctcccgccgacttccgggagacgctgctggaaaaaatagccagcgcgaagcagcgcatttgcattgtcgccctgtatctcgaacaggatgacggtggcaaaggcattctgaacgcgttgtatgaggctaaaaggcagcgtccggaactggatgtgcgggtgctggtcgactggcatcgtgcacaacgtggacgcattggcgctgcggcatctaacactaacgctgactggtactgccgcatggcgcaggaaaatccgggcgtagatgttccggtttatggcgttccaatcaatactcgtgaagcccttggtgttctgcactttaaaggctttatcatcgacgatagcgtactttatagcggtgccagcctgaacgatgtttacctgcatcagcacgataaatatcgctacgaccgttatcatctgatccgtaaccgtaagatgagtgacattatgtttgaatgggttacacagaatattatgaatggccgcggcgttaatcgtctggatgatgttaatcggccaaaaagcccggaaatcaagaacgatattcgtctgttccgccaggagctgcgtgatgccgcttatcatttccagggcgatgccgacaacgatcagctttctgtaacgccgctagtggggctggggaaaagcagtctgttgaacaagaccattttccatcttatgccttgtgccgagcagaaactaaccatctgtacgccatacttcaacctgccagcaatccttgtgcgcaatattatccagttgctgcgcgaagggaaaaaggtcgaaattattgttggtgataaaaccgcgaatgacttctacattccggaagatgaacctttcaagataattggcgcattgccttatctctatgagatcaatctgcgtcgtttcctgagccgtttgcagtattacgtcaatactgaccagctagtggttcggttatggaaagatgacgacaacacctatcacctgaaagggatgtgggttgatgataagtggatgttgatcaccggtaataacctgaacccgcgcgcctggcgtctggatctggaaaacgccattttgatccacgatccgcaacttgagctggcgccacagcgagagaaagaactggagctgatccgcgagcataccaccatcgttaagcactatcgcgatctgcaaagtattgccgattatccggtgaaggttcgtaaactcatccgccgtttgcgccgtatccgcatcgaccgattaattagccgcatcctgtaatcacaaccccgtcctgtacggggtttgttttttggaggccacgttttgcgtattctttttgtctgttcgctattgttactttctggatgcagccatatggctaacgatagctggagcgggcaggataaagctcaacactttatcgccagcgcgatgctttccgccgccggaaatgaatatagtcagcatcaggggatgagccgggatcgcagtgccatgtttggattgatgttctctgtcagtttgggggcgagtaaagagctttgggatagccgccccgaagggagcggctggagctggaaggatttggcctgggatgtcgccggtgcaagcaccggctataccgtctggcaactgacccgtcattaaagacgcatccccttccctttgcgatgtagcatcaaagaaaccagaaacgccaccacggccatcaaggtcacataccagaagaaggctgtttccattcctatacttttcaggctcaacgctacgtactccgcgctaccaccaaatatagcattagcgaccgcataactcagaccaacgcctaatgcgcgaacctgtgccgggaacatctcagccttcagtattccactgatacttgtataaaaactcactatcagcagggcacacatcaccagaccaaaagcggcataagggctggaaacgttttgcaatgcactgagaataggaacggtaaaaatggctgccaggctaccgaaacataacatactggtacggcgaccaatcttatcgctcagcgcgccaatgagtggttgaataagcatgaatacaaacaatgcggcagtcataatgccactcgccacgttggcatgcattcccgcagtatttaccagatacttctgcatataagtagtgaaggtatagaaacaaagggagcccgcagcggtaaaaccgagaaccatgatgaatgcacggcgattgcgccataatcctttcagagatccagcttcttttaaagcgcgcgtttcttgttggctagtttcatctaactgacgacgtaaccacaacgccacaacagctaacacagctcctaacgcgaaaggaatacgccatccccactctctgagtgcagcgtcttccatggtgtgttgtaaaaccacgacaaccagtagggctagcagttgtccgccgatcaacgtcacatactgaaaacttgcgtaaaaacctttgcgcccttcaacggcaacttcactcatataggtggcgctggtgccatattctccgccaacagataatccctgaaataaacgagcgagaagcaataatgccggagcccacgtacctatagtttcataacctgggaggcaggcgataaccaggcttccgaaacacatcatacacacgcttaacagcatgctttttttgcgaccatgtttatcggctatgcggccaaatagccaaccgcctattgggcgcatcaggaatcccgcagcaaaaacacctgctgtttgtagtagttgagtcgtcgtgttcccggaagggaagaagatgtgggcaaagtagagactacagaagctgtagacatagaaatcgaaccactcgaccagattaccactagaggcccccacaatcgcccaaatgcggcgacgagtatcactacttgtcagtttgctgtctgccgttacagtactttcagccatgccattatgtctcctgccgtaatccgatgcttttgtcggtcgcttttgtttattttttttgtaaaggaaatattatacatttgttgcatatcattatgcaaccttaaccatgaatttagttagcaggaaaatggttattgaggagcttaaggataaatttctggtaaggaggacacgtatggaagtgggcaagttggggaagccgtatccgttgctgaatctggcatatgtgggagtataagacgcgcagcgtcgcatcaggcatttttttctgcgccaatgcaaaaaggccatccgtcaggatggcctttcgcataatttgatgcctggcagttccctactctcgcatggggagaccccacactaccatcggcgctacggcgtttcacttctgagttcggcatggggtcaggtgggaccaccgcgctacggccgccaggcaaattctgttttatcagaccgcttctgcgttctgatttaatctgtatcaggctgaaaatcttctctcatccgccaaaacagcttcggcgttgtaaggttaagcctcacggttcattagtaccggttagctcaacgcatcgctgcgcttacacacccggcctatcaacgtcgtcgtcttcaacgttccttcaggacccttaaagggtcagggagaactcatctcggggcaagtttcgtgcttagatgctttcagcacttatctcttccgcatttagctaccgggcagtgccattggcatgacaacccgaacaccagtgatgcgtccactccggtcctctcgtactaggagcagcccccctcagttctccagcgcccacggcagatagggaccgaactgtctcacgacgttctaaacccagctcgcgtaccactttaaatggcgaacagccatacccttgggacctacttcagccccaggatgtgatgagccgacatcgaggtgccaaacaccgccgtcgatatgaactcttgggcggtatcagcctgttatccccggagtaccttttatccgttgagcgatggcccttccattcagaaccaccggatcactatgacctgctttcgcacctgctcgcgccgtcacgctcgcagtcaagctggcttatgccattgcactaacctcctgatgtccgaccaggattagccaaccttcgtgctcctccgttactctttaggaggagaccgccccagtcaaactacccaccagacactgtccgcaacccggattacgggtcaacgttagaacatcaaacattaaagggtggtatttcaaggtcggctccatgcagactggcgtccacacttcaaagcctcccacctatcctacacatcaaggctcaatgttcagtgtcaagctatagtaaaggttcacggggtctttccgtcttgccgcgggtacactgcatcttcacagcgagttcaatttcactgagtctcgggtggagacagcctggccatcattacgccattcgtgcaggtcggaacttacccgacaaggaatttcgctaccttaggaccgttatagttacggccgccgtttaccggggcttcgatcaagagcttcgcttgcgctaaccccatcaattaaccttccggcaccgggcaggcgtcacaccgtatacgtccactttcgtgtttgcacagtgctgtgtttttaataaacagttgcagccagctggtatcttcgactgatttcagctccatccgcgagggacctcacctacatatcagcgtgccttctcccgaagttacggcaccattttgcctagttccttcacccgagttctctcaagcgccttggtattctctacctgaccacctgtgtcggtttggggtacgatttgatgttacctgatgcttagaggcttttcctggaagcagggcatttgttgcttcagcaccgtagtgcctcgtcatcacgcctcagccttgattttccggatttgcctggaaaaccagcctacacgcttaaaccgggacaaccgtcgcccggccaacatagccttctccgtccccccttcgcagtaacaccaagtacaggaatattaacctgtttcccatcgactacgcctttcggcctcgccttaggggtcgactcaccctgccccgattaacgttggacaggaacccttggtcttccggcgagcgggcttttcacccgctttatcgttacttatgtcagcattcgcacttctgatacctccagcatgcctcacagcacaccttcgcaggcttacagaacgctcccctacccaacaacgcataagcgtcgctgccgcagcttcggtgcatggtttagccccgttacatcttccgcgcaggccgactcgaccagtgagctattacgctttctttaaatgatggctgcttctaagccaacatcctggctgtctgggccttcccacatcgtttcccacttaaccatgactttgggaccttagctggcggtctgggttgtttccctcttcacgacggacgttagcacccgccgtgtgtctcccgtgataacattctccggtattcgcagtttgcatcgggttggtaagtcgggatgacccccttgccgaaacagtgctctacccccggagatgaattcacgaggcgctacctaaatagctttcggggagaaccagctatctcccggtttgattggcctttcacccccagccacaagtcatccgctaatttttcaacattagtcggttcggtcctccagttagtgttacccaaccttcaacctgcccatggctagatcaccgggtttcgggtctataccctgcaacttaacgcccagttaagactcggtttcccttcggctcccctattcggttaaccttgctacagaatataagtcgctgacccattatacaaaaggtacgcagtcacacgcctaagcgtgctcccactgcttgtacgtacacggtttcaggttctttttcactcccctcgccggggttcttttcgcctttccctcacggtactggttcactatcggtcagtcaggagtatttagccttggaggatggtccccccatattcagacaggataccacgtgtcccgccctactcatcgagctcacagcatgtgcatttttgtgtacggggctgtcaccctgtatcgcgcgcctttccagacgcttccactaacacacacactgattcaggctctgggctgctccccgttcgctcgccgctactgggggaatctcggttgatttcttttcctcggggtacttagatgtttcagttcccccggttcgcctcattaacctatggattcagttaatgatagtgtgtcgaaacacactgggtttccccattcggaaatcgccggttataacggttcatatcaccttaccgacgcttatcgcagattagcacgtccttcatcgcctctgactgccagggcatccaccgtgtacgcttagtcgcttaacctcacaacccgaagatgtttcacttcagagttgcgaaaatttgagagactcacgaacaactttcattgttcagtgtttcaattttcagcttgatccagatttttaaagagcaaatatatcaaacaagacttaacagtctgttttgagatattgaggtcggcgactttcactcacaaaccagcaagtggcgtcccctaggggattcgaacccctgttaccgccgtgaaagggcggtgtcctgggcctctagacgaaggggacacgaaaattgcttatcacgcgttgcgtgatattttcgtgtagggtgagctttcattaatagaaagcgaacggccttattctcttcagcctcactcccaacgcgtaaacgccttgctattcacttttcatcagacaatctgtgtgagcactgcaaagtacgcttctttaaggtaaggaggtgatccaaccgcaggttcccctacggttaccttgttacgacttcaccccagtcatgaatcacaaagtggtaagcgccctcccgaaggttaagctacctacttcttttgcaacccactcccatggtgtgacgggcggtgtgtacaaggcccgggaacgtattcaccgtggcattctgatccacgattactagcgattccgacttcatggagtcgagttgcagactccaatccggactacgacgcactttatgaggtccgcttgctctcgcgaggtcgcttctctttgtatgcgccattgtagcacgtgtgtagccctggtcgtaagggccatgatgacttgacgtcatccccaccttcctccagtttatcactggcagtctcctttgagttcccggccggaccgctggcaacaaaggataagggttgcgctcgttgcgggacttaacccaacatttcacaacacgagctgacgacagccatgcagcacctgtctcacggttcccgaaggcacattctcatctctgaaaacttccgtggatgtcaagaccaggtaaggttcttcgcgttgcatcgaattaaaccacatgctccaccgcttgtgcgggcccccgtcaattcatttgagttttaaccttgcggccgtactccccaggcggtcgacttaacgcgttagctccggaagccacgcctcaagggcacaacctccaagtcgacatcgtttacggcgtggactaccagggtatctaatcctgtttgctccccacgctttcgcacctgagcgtcagtcttcgtccagggggccgccttcgccaccggtattcctccagatctctacgcatttcaccgctacacctggaattctacccccctctacgagactcaagcttgccagtatcagatgcagttcccaggttgagcccggggatttcacatctgacttaacaaaccgcctgcgtgcgctttacgcccagtaattccgattaacgcttgcaccctccgtattaccgcggctgctggcacggagttagccggtgcttcttctgcgggtaacgtcaatgagcaaaggtattaactttactcccttcctccccgctgaaagtactttacaacccgaaggccttcttcatacacgcggcatggctgcatcaggcttgcgcccattgtgcaatattccccactgctgcctcccgtaggagtctggaccgtgtctcagttccagtgtggctggtcatcctctcagaccagctagggatcgtcgccttggtgagccgttaccccaccaacaagctaatcccatctgggcacatccgatggcaagaggcccgaaggtccccctctttggtcttgcgacattatgcggtattagctaccgtttccagtagttatccccctccatcaggcagcttcccagacattactcacccgtccgccactcgtcagcgaagcagcaagctgcttcctgttaccgttcgacttgcatgtgttaggcctgccgccagcgttcaatctgagccatgatcaaactcttcaatttaaaagtttgatgctcaaagaattaaacttcgtaatgaattacgtgttcactcttgagacttggtattcatttttcgtcttgcgacgttaagaatccgtatcttcgagtgcccacacagattgtctgataaattgttaaagagcagtgccgcttcgctttttctcagcggcgcggggtgtgcataatacgccttcccgctacagagtcaagcatttctttgcttttctctgttgagattctcaggagaaccccgccgacccggcggcgtgtttgccgttgttccgtgtcagtggtggcgcattatagggagttattccggcctgacaagcgaaaaatataaaaactttatcgttcgctcacttttcaggcaaaacatcttaaatatagtcttttccgtctaacttatagacaaaaacgagccccgaagggctcgttttatcatttactggacggcgacaatccggtcttcattaacttccaggcgaatcactttacccggaaccaattcaccagacagtatttgctgtgccagcgggttttcgatctgctgctgaattgcacgtttcagaggacgtgcaccatagaccggatcgtaaccgttctcgctcagcagtttcagcgcctcgtcagaaatgtggatttcataaccacgttcttccagacgtttgtacagacgtttcaactgaatctgcgcaatgctggcaatgtgctgttcacccagcggatggaagaccaccacttcatcgatacggttaatgaattccggacggaagttatggcttaccacaccgagcaccagctctttcatgtgcgcataatccagttcaccgaagcgttcctgaatcagatcggaaccgaggttagaggtcataatgacgaccgtattacggaagtcgaccgttctcccttgcccgtcagtcagacgcccatcatccagtacctgcaacagaatgttgaagacatccggatgcgctttttccacttcatccagcaggatgacggaatacggacgacgacgcaccgcttcggtcaggtagccaccttcttcataaccgacatatcccggaggcgcaccaaccaaacgagacacgctgtgtttctccataaactcggacatatcgatacggaccatcgcctcgtcgctatcaaacataaagttcgccagcgccttacaaagctctgttttccccacaccagttgggccgaggaacaggaaactaccaatcgggcgatttggatccgccagccccgcacggctacgacgaatagcgttagataccgcatcaaccgcttcgttctgaccaattacgcgatggtgcagttcttgctccatacgcagcagtttttcgcgctcgctttccatcatgcgagaaaccggaatccccgtccaacgcgccagcacttcagcaatttcggcgtcggtcactttattacgcaacagacgcatagttttgccttcgagctgcgttgcggcttccagttgcttttccagttccgggattttgccgtattgcagttcagacatccgcgccaggtcccccacacggcgagcctgttcaatagcgattttcgcctgttccagttccgctttaatggtctgcgtaccagaaaggcttgccttctctgctttccactcttcttctaactcggagtactgacgttctttgtcgctcagttcttcgttgagcatatccagacgttttttactggcttcatcagactctttcattaacgcctgttgttccagtttgagctggatgatacgacgatcgagtcggtcgagttcttctggtttactgtcaatctgcatacgaatgctggatgctgcttcatcgatcaggtcgatggctttatccggcagctgacggtcagcaatgtagcgatgagacaacgtcgccgctgcaacaattgccgggtcagtaatttgcacatggtggtgcaattcgtaacgttctttcaggccacgcagaatcgcaatggtatcttcaacagaaggctcggcaacaaacactttctggaaacgacgttccagcgcagcatctttttcaatgtactggcgatattcgtcaagcgtcgtggcacctacgcagtgcaattcaccacgcgccagcgccggtttcagcatgtttccggcgtccattgcgccatcggctttacccgcgccgaccatggtatgtaattcgtcgataaataggatgacgttgccttcctgtttggcaagatcgttaagcacgccttttaaacgttcttcaaactcaccgcgatatttcgccccagccaccagcgcgcccatatccagcgccagtacccggcggcctttcaacccttccggcacttcgccgttgataatacgctgcgccagaccttcaacgatggcagttttaccgacgccgggttcaccaatcagtaccgggttatttttagtacgacgttgcagcacctgaatggtacggcgaatttcttcatcacgaccaatcaccggatcgagtttgccctgttcggctcgttcggtaaggtcgatggtatattttttcaaagcctgacgttggtcttcagcaccttgatcgttcacgctttcacctccacgcatttgttcaatcgcttgagtaatgttggcggtggtcgcccctgctgctttcaggatgtcggccagcgtgccgcgagactcaagtgccgccagaacgaacagttcactgctgataaagttatcaccacgtttttgcgccagcttgtcgcaaagattaagaacgcgcaccagatcctgacttggctggacatcaccaccagtaccttcaacctgcggtaaacgatttaatgcctgattgatatctgtgcgcaactggccagcatttatgccagcggatgttaataaaggactaacgctacccccttcctgattcagcagggcgctcattaaatgaagtggttcgataaattggttgtcgtgcccgagtgcaagactttgggcatcggcaagagcaagctggaatttattagtaagacgatccagacgcataactcctcccataacggatcaaagttgctactggagattaaatgaggtcatccctcaattattcaaggttattgaccagattaatgtgaaaagaaaatcacgcgtaccggatcgtcttgattctttaggttatatcagccaaatgaaacttgccatacgaccggtggtcttgtcgcgacgataagagaagaaagtctcattttccgtatatgtacaacggtcgccgccgaaaatttgctcaacacccacgttcgccagacgctgccgggcaagctgataaatatccgccagatacttatcaccatgctgaatgaaagctgcacttgctttagcgtctactgccataaacgcctcgcgaacctccccccccacttcgaacgcgcgtggaccaattgccggccctaaccaggcgagaatattttccggattatcagcaaaacaggaaaccgtctcttccagcacgcctgcgcacagtccacgccagccagcatgagcggcggcgacttccgttcccgctcgattgcaaaacagcacagggaggcagtcggcagtcatcactgcgcaaaccgtgccgggcgtattgctataagaggcatccgcccgtttactggcataaggttcgccagtgagcttaagcacatctttgccgtgtacctgctcaagccagaccggtttagaaggcaaattgcccgcagcaaaaagtcgcttgcgattctcctcaacgtgatccgggttatcgccacaatgggcaccgaggttgagactgtcatacgggggcaagctcacgccgccgatacgagtggagctacaggccgcaacaccttttggctgcggccactgcgggacaatcagcttactcataaccagtccacttcatccttatgttcttcgaaatcggcgcgcatcacctcaatcagctccaccatatcttgtggaataggcgcatgccattccatttcgatgccggagatcgggtgataaagacgcagcatggttgcatgtagcgcctggcggtcaaacttacgcagcgtggagataaatgcttcgctagcaccttttggcggacgcggacggccaccataaaccggatcgcccaccagcggatgagtgatatgggccatatgcacgcggatctggtgcgtacgtccagtttccagacgcaaccgcagacgcgtgtgcacacggaagtgttccatgatgcgatagtgagtcaccgctggtttgcccatcggatgcaccgccatatgggtacgtttggtcgggtggcgactgattggctcgtccaccgtgccacctgcggtcatatgaccaatcgccaccgcttcatactcacgagtaatttcacgccgttgcaaagattcgactaaacgcgtctgagccggaacggtttttgccacaaccatcaggccagtggtgtctttatccagacgatggacgatgcccgcacgcggtacatcggcaatgggtggatagtaatgaagcaacgcattcagtaccgtgccatccgggttacccgcgccaggatgtaccaccaggtcgcgcggtttattaatgataataatgtcttcatcttcatagacgatatccagcgggatatcctgcggttcaaaacgcgcttcttcttcaatctcagcgttgatggcaacctgctcgccacccaatactttttctttcggcttatcacaaactttgccgttaaccagcactcgctggtcgaggatccattcttttattcggctacgactataatccgggaacatttcggccaaagcctgatctaagcgttgaccgagttggttttcggacaccgttgcagtgagctgtactcgttgtgccatatatactgcttcttcgtttatcgttggggttttacggctttgccgtttaatatagtgtgctattgtagctggtcttaaccgggagcaggaacagagaatctcccgtattacattttgaggaaagtcaaaacgtcatgacgcgcatgaaatatctggtggcagccgccacactaagcctgtttttggcgggttgcagcgggagtaaggaagaagtacctgataatccgccaaatgaaatttacgcgactgcacaacaaaagctgcaggacggtaactggagacaggcaataacgcaactggaagcgttagataatcgctatccgtttggtccgtatagccagcaggtgcagctggatctcatctacgcctactataaaaacgccgatttgccgttagcacaggctgccatcgatcgttttattcgccttaacccgacccatccgaatatcgattatgtcatgtacatgcgtggcctgaccaatatggcgctggatgacagtgcgctgcaagggttctttggcgtcgatcgtagcgatcgcgatcctcaacatgcacgagctgcgtttagtgacttttccaaactggtgcgcggctatccgaacagtcagtacaccaccgatgccaccaaacgtctggtattcctgaaagatcgtctggcgaaatatgaatactccgtggccgagtactatacagaacgtggcgcatgggttgccgtcgttaaccgcgtagaaggcatgttgcgcgactacccggatacccaggctacgcgtgatgcgctgccgctgatggaaaatgcataccgtcagatgcagatgaatgcgcaagctgaaaaagtagcgaaaatcatcgccgcaaacagcagcaatacataacagaaacctgaaacacaaaacggcagcccttgagctgccgtttttttattctgtcagttgtgaaactgaagcgatttagtcgctatcgatctcatcaaatatggctcgctttgagatattcctcaagtaaaaaaacatctcttcctgcgatttctcacaaaaaagattcgttgacaaaaagtgacaaaattatgagattttcatcacacattttgacatcaggaacggtatgctgaattcaccaagacgggaagacaagaggtaaaatttatgacaatgaacattaccagcaaacaaatggaaattactccggccatccgccaacatgtcgcagaccgtctcgccaaactggaaaaatggcaaacacatctgattaatccacatatcattctgtccaaagagccacaagggtttgttgctgacgccacaatcaatacacctaacggcgttctggttgccagtggtaaacatgaagatatgtacaccgcaattaacgaattgatcaacaagctggaacggcagctcaataaactgcagcacaaaggcgaagcacgtcgtgccgcaacaagcgtgaaagacgccaacttcgtcgaagaagttgaagaagagtaatcctttatattgagtgtatcgccaacgcgccttcgggcgcgttttttgttgacagcgtgaaaacagtacgggtactgtactaaagtcacttaaggaaacaaacatgaaacacataccgtttttcttcgcattcttttttaccttcccctgaatgggaggcgtttcgtcgtgtgaaacagaatgcgaagacgaacaataaggcctcccaaatcggggggccttttttattgataacaaaaaggcaacactatgacaagcgaaaacccgttactggcgctgcgagagaaaatcagcgcgctggatgaaaaattattagcgttactggcagaacggcgcgaactggccgtcgaggtgggaaaagccaaactgctcagccatcgcccggtacgtgatattgatcgtgaacgcgatttgctggaaagattaattacgctcggtaaagcgcaccatctggacgcccattacattactcgcctgttccagctcatcattgaagattccgtattaactcagcaggctttgctccaacaacatctcaataaaattaatccgcacagtgcacgcatcgcttttctcggccccaaaggttcttattcccatcttgcggcgcgccagtatgctgcccgtcactttgagcaattcattgaaagtggctgcgccaaatttgccgatatttttaatcaggtggaaaccggccaggccgactatgccgtcgtaccgattgaaaataccagctccggtgccataaacgacgtttacgatctgctgcaacataccagcttgagcattgttggcgagatgacgttaactatcgaccattgtttgttggtctccggcactactgatttatccaccatcaatacggtctacagccatccgcagccattccagcaatgcagcaaattccttaatcgttatccgcactggaagattgaatataccgaaagtacgtctgcggcaatggaaaaggttgcacaggcaaaaagtccgcatgttgctgcgttgggaagcgaagctggcggcactttgtacggtttgcaggtactggagcgtattgaagcaaatcagcgacaaaacttcacccgatttgtggtgttggcgcgtaaagccattaacgtgtctgatcaggttccggcgaaaaccacgttgttaatggcgaccgggcaacaagccggtgcgctggttgaagcgttgctggtactgcgcaaccacaatctgattatgacccgtctggaaagtcgcccgattcacggtaatccatgggaagagatgttctatctggatattcaggccaatcttgaaagtgcggaaatgcaaaaagcattgaaagagttaggggaaatcacccgtagtatgaaggtattgggctgttacccaagtgagaacgtagtgcctgttgatccaacctgatgaaaaggtgccggatgatgtgaatcatccggcactggattattactggcgattgtcattcgcctgacgcaataacacgcggctttcactctgaaaacgctgtgcgtaatcgccgaaccagtgctccaccttgcggaaactgtcaataaacgcctgcttatcgccctgctccagcaactcaatcgcctcgccgaaacgcttatagtaacgtttgattaacgccagattacgctcactgctcataatgatgtcggcataaagctgcggatcctgagcaaacagtcgcccgaccatcgccagctcaaggcggtaaatcgggctagagagcgccagaagttgctcaagctgaacattttcttctgccaggtgcagcccgtaagcaaaagtagcaaagtggcgcagtgcctgaataaacgccatattctgatcgtgctcgacggcgctaatacgatgcagccgagcgccccagacctgaatttgctccagaaaccattggtatgcttccggtttacgtccatcacaccagaccacaacttgctttgccaggctaccgctgtccggaccgaacatcgggtgtagccccagcaccggaccatcatgcgccaccagcatggcctgtaatggcccatttttcacacttgccagatcgaccagaatacaatctttcggtaaaggcggtaatttgccaataacttgctcagtaacgtggattggcacactaacaatcaccattccggcatcggcaacaatatcagccgctcgatcccagtcatgttgctccagaatccgcacctgataaccgctgagggtcagcatcttctcgaacaggcgtcccatctgaccgccaccgccgacgataaccaccggacgcagactcggacaaagtgttttaaatcctttgtcgttttcactggagtaagattcacgcatcacccgacgcaaaacatcctcaatcagatctggcggtacacccagagcttccgcctctgcacgacggctggccaacatagatgcctcgcgctccggaacataaataggcagtccaaagcggcttttcacctcgcccacttcagcaaccagttccagacgcttcgctaataaattcagcagcgctttatcgacttcatcaatttgatcgcgtaatgcggtcaattcagcaaccataataaacctcttaagccacgcgagccgtcagctgcccgttcagatcctgatgaatttcacgcagcaaggcatcggtcatttcccagctaatgcaggcatcggttacggatacaccgtatttcatttcactgcgcggttgctcggaagactgattgccctcgtggatattactttcgatcatcagaccaataatactgcgattgccatctttgatttgagcaaccacggattctgccaccgcaggctgacggcgataatctttattggaattaccgtggctgcaatctaccatcagagacgggcgcagtcccgcctgttccatctctttttcacattgcgcaacatccgcagggctatagttcggcgctttaccaccgcgcaggatcacatggccgtccggattcccctgagtttgtagcaacgcaacctgccctgcctggttaatgccaacaaaacggtgcggctgggcggcggcgcgcatagcgttaattgctgttgccagactgccgtcggtgccgtttttaaaaccaaccggcatggaaagcccggaggccatttcacggtgagtttggctttccgttgtacgagcaccaattgcactccagctaaacagatcgcccaggtattgcgggctattcggatctaacgcttccgtcgccagtggcagtcccatattcaccagctcaagcagcaatttacgcgcgatctgcagcccggcttctacatcaaaagagccatccatatggggatcgttaattaaccctttccagccgacagtggtacggggtttttcaaaatagacgcgcattaccagatagaggctatcgctgacctctgcggcaagggctttaaatcgacgagcatattccagagcagtttccggatcatgaatggaacaaggaccacatactaccagcagacgaggatcgcgcccggcgataatatcactaatgcttttacggctgtcagcaatctgggcttcttgttgcaggctcaatggaaaagcggccttcagttgttccggagtcattaaaacctgttcgtcggtaatatgtacgttattcagcgcgtctttttgcatgatggcgatcctgtttatgctcgtttgcgatagttgatcctcagcgaggatgacgtaacgataacacataaagtaaagttttcaatccatatttcgtacatttttatttacacaggcaatttagtcgcgctttcaacccttacctctgtatagataaatttacactccctttgaaaacaatccgctatgctttgaaaaaggagaaagaaatgatgaaaaagtttatcgcccccttgttggctttactggttagcggatgtcagattgatccttatactcacgcgccaaccttgaccagcaccgactggtatgatgtcggtatggaagatgcgataagcggcagcgccataaaagatgacgatgcatttagcgatagtcaggcggatcgcggtctataccttaaaggatatgccgaaggacaaaagaaaacttgccagaccgattttacttatgcccgaggactttccggtaaaagctttcctgccagctgcaacaatgttgaaaatgccagccaactgcatgaagtaggcaaaaaggggctgatgaaaatgccagcacaatacgattaaattaattaaaaccccacaaataaattaaacataagattttactcattgtgttttatttctcacattgatgacggtcgcatgaaaaaatgatattttaatgagcattctgaaaaaatatcgatgcatttcgagcgaagatggtggggatccctgaatgcgtttttctcaccgactgttcttacttctgattctcctgctgacgggagcaccaatactcgctcaggagccttctgacgttgcgaaaaacgtgcgtatgatggtttccggtattgtcagttacacccgctggcctgcgctaagtgggccaccaaagttatgtatctttagttctagtcgttttagtaccgccctacaagagaatgccgcgacatctttgccttatctgcctgtcatcattcacactcaacaagaggcgatgattagtggctgcaatggtttttattttggcaacgagagtccgacattccagatggaattaaccgaacaatatccgagtaaggcgttattattaattgccgaacaaaataccgagtgcattattggtagcgccttttgtctgatcatccacaataatgacgtcagatttgccgtaaacctggatgccttaagccgtagcggtgtaaaggtcaacccggatgtcttaatgctcgcacggaagaaaaatgatggataacgataattctcttaataagcgccccacgtttaaaagagcattacgcaacatcagtatgaccagcatatttatcactatgatgctgatctggttgctgctttccgtgaccagcgtgctgaccctgaaacagtacgcgcaaaaaaacctggcactgacagcagcaacaatgacttacagtctggaagcagctgtcgtttttgccgatggccctgcagcaactgaaacactggcagcgctgggccagcaagggcaatttagtactgcagaagtacgtgataagcagcaaaatattctggcatcctggcattacacccgtaaggatccaggcgatactttcagtaatttcataagccactggctcttccctgcccccatcattcagccgattcgtcacaatggtgaaaccattggcgaagtacgcttaaccgctcgcgacagtagtatcagccattttatctggtttagcctcgccgtactgaccggttgtattctgctggcaagtggcatcgcaattaccctcacccgccatttgcacaatggcctggtagaagcgctgaaaaatatcaccgatgtcgtacatgatgtgcgttccaaccgcaatttttcccgacgagttagcgaagaacgtatcgctgagtttcaccgcttcgctctcgacttcaacagtctgctggatgaaatggaagagtggcagcttcgtttacaggctaaaaatgcgcagcttctacgtaccgcgctacatgacccattaaccgggctggctaaccgcgcagcgtttcgtagcggcatcaacacgttgatgaacaattccgatgcccgaaaaacgagcgcgttactatttcttgatggcgataatttcaaatacatcaatgatacctggggtcatgcgacgggcgatagagtcttgattgaaatcgcaaaacggttagctgaatttggcgggctgcgacataaagcataccgcctgggcggcgatgaattcgctatggtgctctatgatgtacagagcgaatctgaagtgcagcagatatgtagtgcactgacacaaatctttaatctcccgtttgatcttcataatggccatcagaccaccatgacattaagcattggttacgcgatgaccattgagcacgcctctgcggaaaaattacaagagcttgccgatcacaatatgtatcaggccaaacaccagcgtgccgaaaagctggtgagataacaaggatatatcgatatgataaagcacctggtagcacccctggttttcaccagtctaatactgactggctgccagtcccctcagggaaagtttactcctgagcaagtcgccgctatgcaatcttatggatttactgaatccgccggcgactggagcctgggcttaagtgatgccattctgttcgcaaaaaatgactacaaattgctcccggaaagccagcaacagatccaaaccatggcagctaaattggccagcacagggctaacacatgcccgtatggatggacacaccgataactatggtgaagacagttacaacgaaggcttaagtttgaaacgggcgaatgtcgtggccgatgcatgggctatgggtggacaaattccacgcagcaatctcaccacacagggtttaggaaaaaaatatcccatagccagtaacaagaccgcccagggccgcgccgagaaccgccgcgtcgcagtggtgattactaccccttaaaacaccagcaaacagataaaaaagggccagccaattggccagcccttcttaacaggatgtcgcttaagcgaaatcttagttaagacgctctttgatacgagcagccttaccagtacgctcacgcaggtagtacagtttagctttacgaacagcaccacgacgtttgacagaaatgctgtcaactaccggagagtgagtctggaagacacgctcaacgccttcgccgttggaaattttacgaacagtgaatgcagagtgcagaccgcggttacgaatagcgataaccacgccctcgaatgcctgcagacgttttttggaaccttcaacaacccatactttcacttccacggtatcacccggacggaaggaaggtacgtcctgcttcatctgctcttgttcaagttgcttaataatgttgctcataatttaatctcttatcctgggtaaactgatatctcgggggcttacgccatcccatcatgtttatgttgctgttgtgcgtgttccgttttgaactccgccagcaaccttgcttgctcttcagtcagagccaggttttccagaagttcaggtcttctaagccaggtacggcccaggctctgtttcaaacgccagcgacgtatctcggcatggttgccgctcagtaacactggcggaacttccatcccttctaacacctcaggccgcgtatagtgcgggcaatccagcaatccttcagcaaaggaatcttccgttgcgctggcttcatgtcccagtactcccggaataaaccgggaaacggagtcaatcagcgtcattgctggtaactcaccaccactgagaacgtaatcgccgatactccattcttcgtcaatttcggtttggatcacgcgctcatctataccttcgtagcgaccgcacaccagaatcaatttttgattcgttgccagttcgctgacgcccgcttgatcaagcttgcgtccctgtggactcagataaatcacctttgcgccttcacccgccgcggcttttgctgcatgaatggcgtcccgcaagggttgcaccatcattaacatccccggtccgccgccgtaaggacgatcgtccacggtacggtgccggtcatgcgtgaagtcgcgaggactccagctctggatgctcagcaggccatttttaactgcccggccagttaccccgtaatcggtaattgcgcggaacatttcaggaaacaggctaattatgccaatccacatagcgccgtcttttaccgtttatccggtggtttaaaaaccaggatcccaatctacttcgatactacgagtagtgagatcgactttcttgataacctgcccatcgaggaacggtacgagacgttccttgataccaaacgcatctttcaggtttgccttaatgacgagaacgtcattagatccggtttccatcatatcgacgactttaccgagatcgtagccttcagtggttactacctggcagcccatcaggtctttccagtagtagtccccctcttcaagctgaggcagctggctactatccacgacaatttcacaattcgtcagcaggttcgccgcatcacgatcgtcaacgcctttcagcttgatgatcatgtcctgattgtggtgcttccagctttccagctggacttgctgccactgacccgccttctggataaaccagggctgatagtcaaaaatgctttcggcgtcttcggtggaagaaaacactctgagccacccacgaataccgtaagagctacccatttttcccaaaacgatgggatcaacaggtgcttgcgcggtgagttgtttgctcatcatgaccaccgtgacagattaagctgctttgtttacttctttgatcagcgcagcaacgcgatcagaaatagttgcgccctggccaacccagtgagcgatgcgatccagatccaggcgagtgccttcttctttttcgctagcgattgggttgaagaaaccaacgcgctcgatgaagcgaccgttgcgtgcattacggctgtcagcgacaacaacctggtagaacggacgctttttagcgccgtgacgtgctaaacgaatagttaccataacatcctcttgtgtgaataaaacaaccggaccccatcgaggaacggagtccggtgtcatattaaaagcccgaaaattttactcatttttgcgggaattgcaatcaacagttgctaactctgctgtaaaaggccgtcggcggtgcagccagtttggtgccggagtgcgcgcagtcaccggagcgtacacgcagtacgtgaggatgacgagcacatcccggtgccaaaatggcaaacaagccaggccgattagcgaccagggaagcctgggggcatcatacccttcatgcttctcatcatcttcgccattccgcccttcttcattttcttcatcatgcgctgcatgtcgtcgaactgtttcagaagacggttaacgtcctgcacctgcataccgcaaccggcagcaatacggcgtttacggctacctttgatgatttctggcttagcgcgctctttcatcgtcatgctgttgatgatggcttccatacgcaccagcactttatcgtccatctgactcttgacgttatccgggatctgccccatgcccggcagcttgcccatcagactagccatgccgcccatatttttcatctggcgcagctgctcaagaaagtcgttgagatcgaagccgtcaccttttttcagcttgctggctaatttctctgcctgcgcgcggtcaactttgctttcgatatcttcgatcaggctcagtacgtcgcccatgccgagaatacggctcgcgatgcggtccggatggaacggctccagcgcctcagttttctcgccaacaccgaggaacttgatcggtttgccagtgatgtgacgaatagagagcgccgcaccgccgcgggcatcgccgtccactttggtcaacactacgccggtaagcggtaacgcttcattgaatgcttttgccgtattggccgcatcctgaccggtcatggcgtcaaccacaaacagggtttcaaccgggttaatgctcgcatggacttgtttgatctcgtccatcatcgcttcgtcaacgtgcagacgaccagcggtatccaccagcagcacgtcgtagaatttcagtttggcttctttcagcgccgcgttaacgatatctaccggcttctgaccaacatcagaagggaagaaatcaacgcccacctgctctgccagcgtctcaagctgtttgattgccgccgggcgataaacgtcggcagaaaccaccagcactttcttcttgtgcttctcgcgcaggaacttaccgagtttaccaacgctggttgttttaccggcaccttgcaggcccgccatcagtacgaccgcaggcggttgcgcagccaggttcagggtctggttctcttcgcccatcgccgcaaccagttcgttacggactattttgacgaactcctgccccggcgtcaggctcttattaacttcatgaccaaccgctttctcttttacgcgattgataaactcacgcactaccggcagagctacgtccgcctccagcagcgccatgcgcacttcgcgcagcgtatcttttacgttgtcttcagtgaggcgtccacggccactgatattgcgcagcgtgcggctcaaacgatcggttaaattatcaaacattgtctctcgcctggggtggaaacggttggccgcaatcgcgacacatcatcagtattttgccgcagtataacatgaaggcgtctttgttgttatgcaacggttggagcagcgtagtcctgacgctatactgcttctctttcttattgctcaaactgtcgacatcactatgcccgtttttgctctgctcgcgcttgtcgcctactccgtcagtcttgcgctgattgttcccggtctgctgcaaaaaaacggcggctggcggcgcatggctattatttctgcggtcattgcgctggtctgccacgcaatcgctctggaagcccgcatcctgcccgacggtgatagcggacaaaacctcagcctgctgaacgttggtagtttggtcagtttgatgatctgtacggtaatgaccattgtggcttctcgcaatcgtggctggctgctgctacccattgtctatgcctttgcgcttatcaacctggcgctggcaaccttcatgcccaatgaatacatcacccatctggaagctacgcctgggatgctggtgcacattggcttaagcctcttttcctatgccacgctaattatcgccgccctgtacgcgctgcaactggcgtggattgattaccaactgaagaacaagaagctggcgtttaaccaggaaatgccgccattgatgagtatcgagcgtaaaatgttccacatcacgcagattggcgtggtgctgctaacgctcacgctttgcactggcctgttctacatgcacaacttatttagcatggaaaatatcgacaaggctgtgctctctatcgtggcgtggtttgtctatattgtgctgctgtggggacattatcatgaaggatggcgtggacgccgcgtcgtctggtttaacgttgcgggcgcggtaattctgacactggcctacttcggcagccgaattgtccagcagttaatcagctaaacccagaaaaggagtttcccctggaacacatttctactactacgttgatcattattctgatcatcatggtggtcatttcagcctatttttccgggtccgaaaccggaatgatgaccctcaaccgctatcgtctgcgacatatggcgaaacagggtaatcgcagcgccaaacgcgtcgaaaaattgctgcgtaagccagaccgcctgataagcctggtgttaatcggcaataacctggtcaatattcttgcctccgcgctcggcactattgttgggatgcgtttgtacggcgatgcgggcgtggcaattgcgactggtgtgctgacttttgtcgtactggtatttgctgaggtattgccgaaaaccattgccgcgctgtacccggaaaaagtcgcttatccgagtagttttctgctggctccgctgcaaattttgatgatgccgctggtctggttgctgaatgctatcacccgtatgctgatgcgcatgatgggtatcaaaaccgatatcgtggttagcggctctttgagcaaagaagagttgcgcactatcgtgcacgaaagtcgcagtcaaatttcccgtcgcaatcaggatatgctgctgagcgtgctcgatctggaaaaaatgaccgttgatgacatcatggtgccgcgcagtgaaattatcggtattgatatcaacgatgactggaaaagcattctgcgccaactctcccacagtcctcacgggcgcatcgtgctctaccgtgatagcctggacgacgccatcagtatgctgcgagtacgtgaagcctggcggttgatgagcgagaaaaaagagttcaccaaagaaaccatgctgcgcgccgcggacgagatctattttgtgccggaaggtacgccgctcagcacgcagttggtaaagtttcagcgcaacaaaaagaaagtcggcctggtcgtcaacgagtatggagacattcaggggctggtgacggttgaagatattctggaagagattgtcggcgatttcactacgagcatgagcccaacacttgccgaagaggtcacgccgcaaaacgacggtagcgtgattatcgatggcaccgccaacgtgcgggaaatcaacaaagcctttaactggcatctaccggaagatgatgcccgcacggttaatggcgtcattcttgaggcactggaagagatccctgtcgcaggcacccgcgtgcgtattggcgagtacgatatcgatattctcgacgtacaggacaatatgattaagcaggtaaaagtttttcctgtgaaaccgctgcgcgagagtgtggcggagtaacgaaaacggcccggcattcgcatgcagggccgtgaattattacgaaagcagaaattaagcttttgctttcgctacagtaaccatcgccgcacgaatcgtacgaccattcagcgtataacccttctgcataatgcccagtacgttacctggcgcaacgtcatcagattccaccattgcgatggcctgatgcacattcgggtccagtgggacgttagtttcggcgatcacttcaacgccaaacttacgcacaacatccagcatgctcttcagcgtcagctcaatgccttcaaccatcgcagacatatccgggttagctttatcagccacttccagcgcacgatccaggctatcaatcaccggcagcaattcgttgatgaatttctccagcgcgaatttgtgggctttttcaatatccagttcagtacgacgacgcaggttttccatttcggcttttacacgcaaaatgccgtcacgttcacgggtctgggcttcagccagctgagcttcgagattcgcaactttttcatcgcgcggatccacctgctcagcagaagcttctggctcaactgcctcaatctcttcgtgctgatccatgataatttcttccggggcttgcccctcaggcgttttctgttctttactactcatgaatttctccgcgtttttttcgcattcatctcgctaacttcgcttattatggggatcagtttcagggtttcaagggaagcactcacattgtcatcaatcttcgcaacaaggacctcggaaaaatgaataatcatttcaagtgtattggcattgtgggacacccacggcaccccactgcactgacaacacatgaaatgctctaccgctggctgtgcacaaaaggttacgaggtcatcgttgagcaacaaatcgctcacgaactgcaactgaagaatgtgaaaactggcacgctcgcggagattgggcaactagctgatctcgcggtagtcgttggtggcgacggtaatatgctgggcgcggcacgcacactcgcccgttacgatattaaagttattggaatcaaccgtggcaacctgggtttcctgactgaccttgaccccgataacgcccagcaacagttagccgatgtgctggaaggccactacatcagcgagaaacgttttttgctggaagcgcaagtctgtcagcaagattgccagaaacgcatcagcaccgcgataaatgaagtggtgcttcatccaggcaaagtggcgcatatgattgagttcgaagtgtatatcgacgagatctttgcgttttctcagcgatctgatggactaattattagcacgccaacaggctccaccgcctattccctctctgcaggcggtcctattctgaccccctctctggatgcgattaccctggtgcccatgttcccgcatacgttgagtgcacgaccactggtcataaacagcagcagcacgatccgtctgcgttttagccatcgccgtaacgacctggaaatcagttgcgacagccagatagcactgccgattcaggaaggtgaagatgtcctgattcgtcgctgtgattaccatctgaatctgattcatccgaaagattacagttatttcaacacattaagcaccaagctcggctggagtaaaaaattattctaattttacgccagcctctttactgtatataaaaccagtttatactgtacacaataacagtaatggtttttcatacaggaaaacgactatgttggcacaactgaccatcagcaactttgctatcgttcgtgagcttgagattgattttcatagcggcatgaccgtaataactggcgagaccggcgcgggtaaatctattgcaatagatgccctcggtctttgtctcggtggtcgcgctgaagccgacatggtgcgtaccggcgctgctcgcgctgacctgtgcgcccgtttttctctgaaagatacgccagcggctctgcgctggctggaagaaaaccagcttgaagacgggcatgaatgtttgcttcgtcgcgtgatcagcagcgatggtcgctcccgtggtttcatcaacggtacagctgttcctctgagtcaactgcgcgaactgggtcagttgctgattcagatccatggtcagcacgctcatcaattactcaccaaacctgagcaccaaaaattcctgcttgatggctatgccaatgaaacctctctactgcaggaaatgaccgcacgttatcagttgtggcatcaaagctgccgtgacctcgcgcatcatcaacagttaagtcaggaacgcgccgcccgtgcggaactgctgcaataccaattaaaagaacttaacgaatttaatccgcagcccggagagtttgaacaaatcgacgaagagtacaaacgtctggcgaacagcggtcaattgctgaccaccagccagaatgcattggcattaatggccgacggtgaagacgcaaacctgcaaagtcagctttacacggctaaacaactggtgagcgaattgattggcatggacagcaaactgtccggcgtacttgatatgctggaagaagctaccatccagattgctgaagccagcgatgaactgcgccactactgcgatcgtctggatctcgatcccaaccgactatttgaacttgaacagcgcatcagtaaacagattagcctggcacgtaaacatcacgtcagccctgaggcattgccacagtattaccagagcctactggaagaacagcagcaactggacgatcaggccgacagtcaagaaacgcttgcgctggcggtaacgaaacatcatcagcaggcactggaaatcgcgcgcgcattacaccaacaacgccagcaatatgcagaagaacttgcacagctgatcaccgacagtatgcatgcgctcagtatgccgcatgggcagtttacgatcgatgttaaatttgacgagcatcacctgggcgctgacggtgccgatcgtattgagtttcgggtaaccaccaacccaggtcagccaatgcagcctattgccaaagtcgcatccggtggtgaattgtcccgcatcgcactggcaatccaggtcatcacggcgcgtaaaatggaaaccccggcactgatttttgatgaagtggatgtagggattagcggtccaacagcggcagttgtcggcaaactgctgcgtcaactcggcgaaagtactcaggtgatgtgtgttacccacctgccacaagtcgcgggatgtggtcatcaacactattttgtcagcaaagaaaccgatggtgcgatgacagaaacgcatatgcaatccctgaataaaaaagcgcggttacaagagctggcgcgcctgcttggtggcagtgaagtcacacgtaatacactggcgaatgcgaaagaactgcttgcagcgtaaacttttttcctgcttcacggtcagagtaaacagcaaaacgccgtaagaccggaaagcaaaaggttttaaagtgatgaaaggtctattatcatcggcatattacagatgagccacgtactgctcgggcccgaaaaggaatcaaatcactatgcgctgtaaaacgctgactgctgcagcagcagtactattgatgttgaccgcaggctgttccactctggagcgagtggtttaccgtcctgacatcaaccaggggaactatctgaccgctaacgacgtatccaaaatacgtgttggcatgacgcaacaacaagttgcgtacgcattgggtacaccgctgatgtccgatccatttggtacgaatacctggttctatgtcttccgccagcaaccaggtcatgaaggtgtaactcagcaaacgctgacgctgacctttaacagtagcggtgtgttgaccaatattgataacaaacctgcgctgagtggtaactaataataaagttgctctcaaagacgttaaaaaaggtgctcaatgagcaccttttttctgtctgttatttattcgcacttttttctgctcgttgcctgcgaagctctttcggatcggcaatgagagggcgataaatctccacccgatcgccatcatgcacactatcgcttagttttgccggacggctgtaaatgccgactttgtttttagttaaatcgatatcggtacgcaattccagcaagccactggcgcgaatagcttcttcaaccgtcgcgccctcctgcagcgtcactcgctgcaggtactgcttctcaggtagcgcataagccacctcaacggcaattttacctggcactgtaaacctctttcgcacgaaccgtaaaagcctggaccatattagccgccagctctttaaacacgcgaccaaaggcgagttcaatcaacttattggtaaactcaaagtcgagatgaaactcgatacgacacgcctcctggctcagcggcgtaaacttccatccaccaatcaatttcttgaacggcccatccaccagattcataagaatactttggttactggtcaactggttgcgggtagtaaacgttttgctgatcccagccttagagacatctaccgccgcagtcatctgcccaggagtggactccagaatccgacttccggtacaacccggcaaaaactgaggataagactgaacgtcattcactaactgatacatttgctccgcgctgtagggtaccagtgcggtccggctaatctgaggcataacaatttccatcaacaaaaatccaacaaataatatcatttatcctgctgtaaaaaaaacgctatcccggcgctgggtaacatcgggttcatgctaagatagagccttgtcccccgcaggattgatatggggtgttttcgatttcagattaccgatgattcacgacgcttatgacgaagaaaaaagcacataaacctggtagtgcgaccatcgcgcttaacaagcgcgcccgtcacgaatactttatcgaagaagagttcgaagcgggacttgccctgcaaggctgggaagttaaatccctgcgcgcaggaaaagccaatatcagcgacagctacgtccttctgcgtgacggagaggcatttctgtttggcgctaacatcacgccaatggccgtggcctccacgcatgtggtgtgcgatcctacccgtacccgcaagttacttctcaaccagcgcgaactggacagtttgtacggtcgcgtcaatcgagaaggctataccgtagtggcgctctccctgtactggaaaaatgcctggtgcaaagtgaaaatcggcgtcgccaaaggtaagaaacagcacgataaacgtagtgatatcaaagagcgcgaatggcaggtggataaagcacgtatcatgaaaaacgcccaccgttaaacctgcactccaattattgaccagttcctcaccgcgcctccctctccggcggcgcgaatgaacatcttattggctatcacatccgacacaaatgttgccatcccattgcttaatcgaataaaaatcaggctacatgggtgctaaatctttaacgataacgccattgaggctggtcatggcgctcataaatctggtatacttacctttacacattggggctgattctggattcgacgggatttgcgaaacccaaggtgcatgccgaggggcggttggcctcgtaaaaagccgcaaaaaatagtcgcaaacgacgaaaactacgctttagcagcttaataacctgcttagagccctctctccctagcctccgctcttaggacggggatcaagagaggtcaaacccaaaagagatcgcgtggaagccctgcctggggttgaagcgttaaaacttaatcaggctagtttgttagtggcgtgtccgtccgcagctggcaagcgaatgtaaagactgactaagcatgtagtaccgaggatgtaggaatttcggacgcgggttcaactcccgccagctccaccaaaattctccatcggtgattaccagagtcatccgatgaagtcctaagagcccgcacggcgcaagccctgcgggcttttttgtgccctcaatttgtcccgcgaagtccgaagagaactaattaaatccgaaccttttaggcccattgataggcccaacgaaaagctctattgtttacgttgggctaaacgcagggagactccccacctttgaaaacaggatgtagcgatgaaacttaacgacagtaacttattccgccagcaggcgttgattaacggggaatggctggacgccaacaatggtgaagccatcgacgtcaccaatccggcgaacggcgacaagctgggtagcgtgccgaaaatgggcgcggatgaaacccgcgccgctatcgacgccgccaaccgcgccctgcccgcctggcgcgcgctcaccgccaaagaacgcgccaccattctgcgcaactggttcaatttgatgatggagcatcaggacgatttagcgcgcctgatgaccctcgaacagggtaaaccactggccgaagcgaaaggcgaaatcagctacgccgcctcctttattgagtggtttgccgaagaaggcaaacgcatttatggcgacaccattcctggtcatcaggccgataaacgcctgattgttatcaagcagccgattggcgtcaccgcggctatcacgccgtggaacttcccggcggcgatgattacccgcaaagccggtccggcgctggcagcaggctgcaccatggtgctgaagcccgccagtcagacgccgttctctgcgctggcgctggcggagctggcgatccgcgcgggcgttccggctggggtatttaacgtggtcaccggtagcgcgggcgcggtcggtaacgaactgaccagtaacccgctggtgcgcaaactgagctttaccggtagcaccgaaattggccgccagttaatggaacagtgcgcgaaagacatcaagaaagtgagcctggagctgggcggtaacgcgccgtttatcgtctttgacgatgccgacctcgacaaagccgtggaaggcgcgctggccagcaaattccgcaacgccgggcaaacctgcgtctgcgccaaccgcctgtatgtgcaggacggcgtgtatgaccgttttgccgaaaaattgcagcaggcagtgagcaaactgcacatcggcgacgggctggataacggcgtcaccatcgggccgctgatcgatgaaaaagcggtagcaaaagtggaagagcatattgccgatgcgctggagaaaggcgcgcgcgtggtttgcggcggtaaagcgcacgaacgcggcggcaacttcttccagccgaccattctggtggacgttccggccaacgccaaagtgagcaaagaagagacgttcggccccctcgccccgctgttccgctttaaagatgaagctgatgtgattgcgcaagccaatgacaccgagtttggccttgccgcctatttctacgcccgtgatttaagccgcgtcttccgcgtgggcgaagcgctggagtacggcatcgtcggcatcaataccggcattatttccaatgaagtggccccgttcggcggcatcaaagccagcggtctgggtcgtgaaggtagcaagtatggcatcgaagattacttagaaatcaaatatatgtgcatcggtctttaactggagaatgcgaatgaacagcaataaagagttaatgcagcgccgcagtcaggcgattccccgtggcgttgggcaaattcacccgattttcgctgaccgcgcggaaaactgccgggtgtgggacgttgaaggccgtgagtatcttgatttcgcgggcgggattgcggtgctcaataccgggcacctgcatccgaaggtggtggccgcggtggaagcgcagttgaaaaaactgagccacacctgcttccaggtgctggcttacgagccgtatctggagctgtgcgagattatgaatcagaaggtgccgggcgatttcgccaagaaaacgctgctggttacgaccggttccgaagcggtggaaaacgcggtaaaaatcgcccgcgccgccaccaaacgtagcggcaccatcgcttttagcggcgcgtatcacgggcgcacgcattacacgctggcgctgaccggcaaggtgaatccgtactctgcgggcatggggctgatgccgggtcatgtttatcgcgcgctttatccttgcccgctgcacggcataagcgaggatgacgctatcgccagcatccaccggatcttcaaaaatgatgccgcgccggaagatatcgccgccatcgtgattgagccggttcagggcgaaggcggtttctacgccagcagcccagcctttatgcagcgtttacgcgctctgtgtgacgagcacgggatcatgctgattgccgatgaagtgcagagcggcgcggggcgtaccggcacgctgtttgcgatggagcagatgggcgttgcgccggatcttaccacctttgcgaaaagcatcgcgggcggcttcccgctggcgggcgtcaccgggcgcgcggaagtaatggatgccgtcgctccaggcggtctgggcggcacctatgcgggtaacccgattgcctgcgtggctgcgctggaagtgttgaaggtgtttgagcaggaaaatctgctgcaaaaagccaacgatctggggcagaagttgaaagacggattgctggcgatagccgaaaaacacccggagatcggcgacgtacgcgggctgggggcgatgatcgccattgagctgtttgaagacggcgatcacaacaagccggacgccaaactcaccgccgagatcgtggctcgcgcccgcgataaaggcctgattcttctctcctgcggcccgtattacaacgtgctgcgcatccttgtaccgctcaccattgaagacgctcagatccgtcagggtctggagatcatcagccagtgttttgatgaggcgaagcagtaacgccgctcctatgccggaggcgacgctgcgcgtcttgtccggcctacggggatccaggtcggataaggcgtttacgccgcatccgacaatctgtacgtgaacaggaagaaatctatgttggccgggtaaggcggagccgctctccggcaaaaagaatcaataacaattatacgcgtgacccggcgcgggaaatgtcggggcgctctcccaagtgacacactttcgagaggattcaggatggggcaaagtagccaaccacatgagttaggcggcgggctgaagagtcgccacgtcaccatgttgtctattgccggtgttatcggcgcaagtctgtttgtcggttccagcgtcgccatcgccgaagcgggcccggcggtattactggcctatctgttcgccgggctactggtggttatgattatgcggatgttggcggaaatggcggttgccacgcccgataccggtagcttttccacctatgccgataaagccattggtcgctgggcgggctataccatcggctggttgtactggtggttttgggtactggttatcccgctggaagccaacatcgccgccatgatcctgcacagttgggttccaggcattcccatctggttattttccctcgtcattaccctcgccttaactggcagtaacttattaagcgttaaaaactacggcgaatttgagttctggctggcgctgtgcaaagtcatcgctatcctggcctttattttccttggtgcagtcgcaattagcggtttttacccgtatgccgaagtgagcgggatcagtagattgtgggatagcggcggctttatgcccaacggtttcggtgcggtattaagcgcgatgttgatcaccatgttcagctttatgggcgcagaaattgtcaccattgccgccgcggaatccgacacgccggaaaaacatattgtccgcgccaccaacagcgttatctggcgtatttctatcttctatttatgttctatttttgtcgtcgtggcattaattccgtggaatatgcccggactaaaagccgtcggttcttatcgcagcgtactggaattgctcaatattccccatgcgaaattaatcatggactgcgtgatattactttccgtaaccagttgcctgaacagcgcgctgtataccgcgagtaggatgctctactccttaagtcgtcgcggtgatgctcccgcggtaatgggtaaaatcaaccgcagtaaaaccccgtacgtggcggtgttactctccaccggcgcggcattcttaacggtggtggtgaactattacgcgcctgcgaaggtatttaaatttctgatcgacagctccggcgctatcgccctgctggtttatttagtcatcgccgttagtcagttgcggatgcgcaaaattctgcgagcagaaggaagcgaaattcgcttgcgaatgtggctttatccgtggctcacctggctagtcatcggctttattacctttgtgttggtagtgatgctattccgtccggcgcaacagttagaagtgatctccaccggcttattagcgatagggattatctgtaccgtgccaattatggctcgctggaaaaagctggtattgtggcaaaaaacacccgttcataatacgcgctgatcatgatcaggagtcacaccatgaccattacgtctctggatggctatcgctggctgaagaacgatattattcgcggtaattttcaaccggatgaaaaattacgaatgagtttgctgacaagccgttatgcacttggcgttgggccgttacgggaagctcttagccaactggtggcggaacggctggtcacggtggtgaatcaaaaagggtatcgggtggcgtctatgagtgagcaggagctgctcgatattttcgacgcccgcgccaatatggaagcgatgttagtgagtctggcgattgcccgcggtggcgatgagtgggaggcagacgttctcgcaaaagcgcatctgctgagtaagcttgaggcctgtgacgccagcgagaaaatgcttgatgagtgggatctgcgtcatcaggcgtttcatacggcaattgtggcgggctgtggttctcactatttgctgcaaatgcgtgaacggttgtttgatctggcggcgcgttatcgatttatctggctgcggcgaacggtgcttagcgtggaaatgctggaggataaacacgatcagcaccagaccctgactgcggcggtactggcgcgagataccgcgcgcgccagtgagttaatgcgccagcatttactgacgccaattcccattatccagcaggcgatggctggcaattaattactcttccggaatacgcaacacttgccccggataaattttatccgggctttttagcatcggtttattcgcttcgaagattttattgtacagattagcgttaccgtagacctgtttggaaatggcactcagagtgtcgccagacttaacggtataaaactggctggcagtggctggtgtcgccgttttcacctgatcatcgacactggcaataccggaaatattccccaccgcaacaaggattttctccttcgcctcctgactcaggccgtcaccagtgaccgtcgctttgccgtcggcaatttgaatattcactttatcggcatccggtataccggttttgttcagatgctcctgcaccttcttcgcctgatcgtctttatcgtgctgacctgtaaccgcgtcccagagtttttctccggcatctttcacaaaattgaacagacccatagctacctcattcgttaacggaaacactcagaaagtgtagcagaggaacgcggcgcgttaacgccgcggggatgagcacaggtttaatcgcgggtttgcacccagaacgcgtgaatcaaaccggggatatacccaagcagtgtcaacagaatattaataatgaacgcccaaccgaaccctttaccgagcagcacgccgagcggcggcagaatgatggtgatgacgattctccagaaacccatatgtactccctataagaaaattactcattgtttaaaaagagattttatctcttaagcgtagtaattttagcggagcctgccagtttcagcttacgcttttactctcatttacgctgctgaggctggtatatgttgcatttttagtttagagtttacttaatttagaaaatacttaaataaatatgactgaactcgcgcaattacaggccagtgccgaacaggcagcggccttattgaaagcaatgagccaccctaaacgattgctgattctgtgcatgcttagcggttcccccggcaccagcgcgggagagctgacgcgcattaccggactgagtgcctctgcgacaagtcagcatctcgctcgtatgcgggacgaagggcttatcgacagccaacgggatgcccaacgcattctatattccattaaaaatgaggcggtaaatgccattatcgccaccctgaaaaatgtctattgtccgtaaggagtcactatggctttgacaaccattagcccgcatgatgcacaagaattaatcgcacgcggcgcaaagttaatcgatattcgtgatgctgatgaatatcttcgtgaacatattcctgaagcagatctggctccattatccgtgctggaacagagtggtcttccggctaaattacgtcacgagcaaattatattccactgccaggcaggtaaacgcaccagtaataatgccgataaattagcagcgattgccgcccccgcagaaatctttttactcgaagatgggattgatggctggaaaaaagcaggattgccagtagcggtaaataaatctcaacccttgccgttaatgcgccaggtgcagatcgctgcgggtggtttaatattaatcggcgttgtactgggttataccgtaaatagcggtttcttcttattaagtggctttgttggtgccgggttactgtttgcaggaatcagcggtttttgtggaatggcaaggttgttagataagatgccgtggaaccaacgagcttgagaagcgacgccggacgcgccctagcagcgacatccggcctcagtaattagatcaggaaatcgtcgagagatttaccttctgccagcgcctgagcaattggcttcggtgtacggccctgaccggtccaggttttagtttcaccgttaacatcggtgaatttatatttcgccggacgcggctggcgttttttaccagcgcgtggtgcagcagcagagctattacccaataactcttccgggttaattccgtcagctttcatcagctccagccaggtgctaattttttcctggcgctctgccagttcacgctgctgctgttcttcttcttcacgtctttctttagtgacaaccctgaatttttcgagcatttcttcaagaacgtcaatggagaattcgcgagccatcgcacggagggtgcgaatgttatttaaactttgtaacattacggacataataaagaaaaccttttaacgccaaaacaaaaaaagtatttcgtcgcgtagtgtaagcgatcacttattatatttccacaaaatttaatctatttacagtcctgcgcgagattatttcagctgttattttctgaaactctcagaataatttcaagattatatattagccattttgatgagtaatttagattattggtgaacagagcggcgctctctgctcgctaattccgcaagcctgacaaaatcaaagtgaataaaaatgcaatataacagaataaaagaaaacatccatcactggtgctttctgctgttaatgtacattgtctggcataaaaaatgctgaaaatgacccagctactacatacaccgaattctctacgcttatagcgttacctcacccccaaactttcattagtgatattaaaggtaaggccatatctaattgatttaattaaaaataaatcatatcggcatgtaaaaatccacaatgtacaaaaaacgagccgttacggaatattttatctacaaaaactgactaaataaaaatttttcactaattgattagtcatagccagcgatatacgctatgcgaaaatgcagatggcaatgagatccactgctttcatctccattaacatcccattacgcttttattaaggagcattagcatgttcagtccgcagagtcgcttgcgtcatgcagttgcagatacgttcgcgatggttgtttactgttctgtcgtgaacatgtgtattgaagttttcctctccggaatgagcttcgaacagtctttttattccagattggtagcgattccggtgaacatcttaattgcatggccatacggtatgtaccgtgatctgtttatgcgcgcggcacgcaaagttagcccgagcggctggataaaaaatctggcggatatcctggcttatgtgacgttccagagtccggtgtatgtggcgatcttgttagtggtgggcgcagactggcatcagattatggcggcggtcagtagtaacatcgttgttagcatgttgatgggggcggtttatggctacttcctcgattattgccgccgactgtttaaagtcagccgttaccagcaggtaaaagcctgactcttcttttcgcgactggcatcgccagtcgcgtctttaactggcttcgccaaataaaccattcaaataacgttcaagcgcaacacggctactaaagccatgcgggataccgtaatgctcgtgtcgctcgcctgctaaatagagcggaaattgctggtaatgatcgcaagttttaatatcggaagcgggttcagccagtgtgctactgcgttcttttaatgttggatgaattaccagagcggtacgtcccattcgcgcttcgcgattaacatagacataattttccccacggcggtaaccatacgctttctgggttaccacatcgacagtaaaaccgactttttcaagtacgcgcgccacctcgtctggtcgtaaatacatatttgatcctcgttattatcaaccgcgggcctaccttacctgattgcgcattcacaacgctttcagaaaagtccataaagccgcgatgaacctcagttaagaaaattatggtctacactgaaaattacatcgaattctaatgggggatcatatgtttaaccgaccgaaccgcaacgacgttgatgatggcgtgcaggatatccagaatgatgtcaatcaattagctgacagcctcgaatctgtattgaagtcctggggcagcgacgccaaaggggaagctgaagccgcacgcagtaaagctcaggcattgctgaaagaaaccagggcgcgaatgcatggtcgtactcgcgtccagcaagccgcgcgcgatgccgttggctgcgcggattcttttgttcgtgaaagaccctggtgtagcgtgggtacagcagctgcggtaggtatttttatcggcgcactgttaagcatgcgcaaaagctaatgcaaaaatgataataaatacgcgtctttgaccccgaagcctgtcttcggggtttctttttgcctggtgaatcacaaaaatccccctaccccgtcacgctcatatccagggtaatttcgaccactatttgctatatattgtgtggttgaatcttttttcaactacatctagtatctctgtatcaacagagagacaacccgacgcgtatcatcgcgccgtatcttcattttaaacggaaatacgaatcatgcgcattactatttacactcgtaacgattgcgttcagtgccacgccaccaaacgggcgatggaaaaccggggctttgattttgaaatgattaatgtcgatcgcgttcctgaagcggcagaagcgttgcgtgctcagggctttcgtcagttgccggtagtgattgctggcgatcttagctggtctggtttccgtccggacatgattaaccgtctgcatccagcgccacacgcggccagtgcatgagccagctcgtctacttctccagcagctccgaaaacacgcagcgttttatcgaacgtttaggtctgcccgcggtgcgcatcccgctcaatgagcgggaacggattcaggtagacgagccttacatcctgatcgtgccctcttacggcggcggcggtacggctggcgcggtgccacgacaggtaattcgctttttaaacgacgagcacaaccgggcgttgcttcgcggcgttattgcttctggtaatcgcaactttggtgaggcgtatggccgcgccggagatgtgattgcccggaaatgcggcgtgccgtggctgtaccgttttgaactcatgggtacgcaaagcgatatcgaaaacgttcgtaaaggagtaaccgaattttggcaacgacaaccgcagaatgcctgacgcaggaaacgatggattaccacgcgctgaatgcgatgcttaacctctacgatagcgcaggtcgcattcagttcgataaagaccgccaggccgttgacgcctttattgcgacgcatgtgcgtccgaacagtgtgaccttcagtagccagcagcagcgcctgaactggctggtcaacgaaggttactatgatgaaagcgttcttaatcgctactctcgcgactttgtcattacgctgtttacccacgcacacaccagcggttttcgtttccagacattcctcggggcatggaagttttacaccagctatacgttgaagacattcgacggtaaacgttatctggaagattttgccgatcgagtaacgatggtggcgctgacgctggcacaaggcgatgagacgctggcgttgcaactgaccgatgaaatgctgagtggacgctttcagccagccacgccaacattcctcaactgcggtaagcagcagcgcggcgaactggtttcctgttttttgctgcgtattgaagacaatatggagagcattggtcgggcggtaaattccgcactgcagctgagcaaacgcggcggcggcgtagcatttttgctgagcaatctgcgagaagcgggcgcgccaattaaacgtattgaaaatcaatcttctggcgtaattccggtgatgaaaatgctggaagacgcattttcctatgccaaccaactcggcgctcgtcagggggctggtgcagtctatttacatgctcatcatcccgatattctgcgttttctcgacacgaaacgggaaaatgccgacgaaaaaatccgcattaaaacactgagccttggcgtggtgatcccggatatcactttccatctggcaaaagagaatgcgcagatggcgctgtttagcccttatgacgtagagcgagtttatggcaagccgtttgccgatgtggccatcagccaacactatgacgaactggttgccgatgaacgcattcgcaaaaaatacctcaacgcccgtgatttcttccagcgactggcagaaatccagtttgagtccggctatccctacatcatgtatgaagacacggtaaaccgtgctaaccctatcgccgggcgcataaatatgagtaatctctgcagtgaaattttgcaggttaacagcgccagtgagtatgacgagaatctcgactatacccgcacaggccatgatatttcctgcaatttaggtagcttgaatattgcgcacaccatggattcccccgattttgcccgcacggtagagactgccgtgcgcggtttaacggcagtaagtgatatgagtcatatccgcagcgtgccgtccatcgaagccggaaatgccgccagccacgccatcggactggggcagatgaatttacacggctatctggcgcgagaaggcatcgcttatggtagcccggaagcactggatttcaccaatctctatttctatgccatcacctggcatgcactgcgtaccagcatgttgctggcacgcgaacgcggtgaaaccttcgccgggttcaaacagagtcgctatgccagtggtgaatattttagccaatatctgcaagggaactggcagccgaaaacggcgaaagttggcgaactgtttacccgtagcggtattacgttacctacccgtgagatgtgggcgcagctgcgcgacgacgtgatgcgctacggcatatacaaccagaatcttcaggcggtgccgccaaccggttctatctcttatatcaaccatgctacgagcagtattcatccgattgtggcgaaagtagagatacgcaaagagggcaaaacaggacgcgtttactaccctgccccgtttatgactaacgagaatctggcgctgtatcaggacgcttacgaaattggcgcagaaaagatcatcgacacctacgcggaagcgactcgccatgtcgatcaggggctgagcctgacgctttttttccccgataccgccaccactcgcgatatcaacaaagcgcagatttacgcctggcgcaagggtatcaaaacgctctattacatccgcctgcgtcagatggcgctggaaggcactgaaattgaaggctgcgtctcctgtgcactttaaggaatatctatgaaactcagtcgtatcagcgccatcaactggaacaagatatctgacgataaagatctggaggtgtggaatcgcctgaccagcaatttctggctaccagaaaaggtgccgctgagcaacgatattcctgcctggcagacattaactgtcgtagaacaacaactgacgatgcgcgtttttactggcctgacgctgctcgacacgctgcaaaatgttatcggcgcgccttctctgatgcccgatgcactcacgcctcatgaagaagcggtattaagcaatatcagctttatggaagcggttcatgcccgctcttacagtagcattttcagcacgctatgccagaccaaagatgtcgatgccgcctacgcctggagtgaagaaaacgcaccgttgcagcgaaaagctcagattattcagcaacattatcgcggtgatgatccgctgaaaaagaaaatcgccagtgtgtttcttgaatcttttttgttctattccggtttctggctgccgatgtatttttccagccgcggaaagctgaccaataccgcggacctgatccgtctgattatccgcgatgaagcagtccacggttactacataggctataaatatcagaaaaacatggaaaagatatctctgggacaacgtgaagagttgaagagtttcgccttcgatttgttgctggaactctacgacaacgagttgcaatacaccgatgagctgtacgccgaaaccccgtgggctgacgatgtgaaagcgtttctctgttacaacgccaataaggctttgatgaatctgggctacgaaccgttatttcccgcagaaatggcggaagtgaatccggcaatcctcgccgcgcttagcccgaatgccgatgaaaatcacgatttcttttccggtagtggctcctcttatgtgatggggaaagcggttgaaacagaagatgaagactggaatttctgagggtgttattttcaaaaatatcactacccgcagcagggaaataattcccgccaaatagctttttatcacgcaaataatttgtggtgatctacactgatactctgttgcattattcgcctgaaaccacaatattcaggcgttttttcgctatctttgacaaaaaatatcaactttctcgatttgctctcagcccttatatcacgggaaattccggcgatttgctcgcatcaatattcatgccacatttgccatcaggggttgcctcagattctcagtatgttagggtagaaaaaagtgactatttccattgggtaatatatcgacatagacaaataaaggaatctttctattgcatggcaattaaattagaaattaaaaatctttataaaatatttggcgagcatccacagcgagcgttcaaatatatcgaacaaggacttagtaaagaacaaattctggaaaaaactgggctaagccttggcgtaaaagacgccagtctggccattgaagaaggcgagatatttgtcatcatgggattatccggcagcggtaaatccacaatggtacgccttctcaatcgcctgattgaacccacccgcgggcaagtgctgattgatggtgtggatattgccaaaatatccgacgccgaactccgtgaggtgcgcagaaaaaagattgcgatggtcttccagtcctttgccttaatgccgcatatgaccgtgctggacaatactgcgttcggtatggaattggccggaattaatgccgaagaacgccgggaaaaagcccttgatgcactgcgtcaggtcgggctggaaaattatgcccacagctacccggatgaactctctggcgggatgcgtcaacgtgtgggattagcccgcgcgttagcgattaatccggatatattattaatggacgaagccttcagcgcgctcgatccattaattcgcaccgagatgcaggatgagctggtaaaattacaggcgaaacatcagcgcaccattgtctttatttcccacgatcttgatgaagccatgcgtattggcgaccgaattgccattatgcaaaatggtgaagtggtacaggtcggcacaccggatgaaattctcaataatccggcgaatgattatgtccgtaccttcttccgtggcgttgatattagtcaggtattcagtgcgaaagatattgcccgccggacaccgaatggcttaattcgtaaaacccctggcttcggcccacgtagcgcactgaaattattgcaggatgaagatcgcgaatatggctacgttatcgaacgcggtaataagtttgtcggcgcagtctccatcgatagccttaaaaccgcgttaacgcagcagcaaggtcttgatgcggcgctgattgatgcgccgttagcagtcgatgcacaaacgcctcttagcgagttgctctctcatgtcggacaggcaccctgtgcggtgcccgtggtcgacgaggaccaacagtatgtcggcatcattagcaaaggaatgctgctgcgcgctttagatcgtgagggggtaaataatggctgatcaaaataatccgtgggataccacgccagcggcggacagtgccgcgcaatccgcagacgcctggggtacaccgacgactgcaccgactgacggcggtggtgctgactggctgaccagtacgcctgcgccaaacgtcgagcattttaatattctcgatccgttccataaaacgctgatcccgctcgacagttgggtcactgaagggatcgactgggtcgttacccatttccgtcccgtcttccagggcgtgcgcgttccggttgattatatcctcaacggtttccagcaattgctgctgggtatgcccgcaccggtggcgattatcgttttcgctctcatcgcctggcagatttccggggtcggaatgggtgtggcgacgctggttagcctgattgccatcggcgcaatcggtgcctggagccaggcaatggtgactctggcgctggtgttaaccgccctgctgttctgtatcgtcatcggtttgccgttggggatatggctggcgagaagtccgcgagcggcgaaaattattcgtccactgcttgatgccatgcagaccacgccagcgtttgtttatctggtgccaatcgtcatgctatttggtatcggtaacgtgccgggcgtggtggtgacgatcatctttgctctgccgccgattatccgtctgaccattctggggattaaccaggttccggcggatctgattgaagccagccgcagtttcggtgccagcccgcgccagatgctgttcaaagttcagttaccgctggcgatgccgaccattatggcgggcgttaaccagacgctgatgctggccctttctatggtggtcatcgccagcatgattgccgtcggcgggttgggtcagatggtacttcgcggtatcggtcgtctggatatggggcttgccaccgttggcggcgtcgggattgtgatcctcgccattatcctcgatcgtctgacgcaggccgttgggcgcgacagtcgcagtcgcggcaaccgtcgctggtacaccactggccctgttggtctgctgacccgcccattcattaagtaactctgcacttgcccggtgacgccgggcattatcaccctgccaaaaaaaggaataacaatgcgacatagcgtactttttgcgacagcgtttgccacgcttatctctacacaaacttttgctgccgatctgccgggcaaaggcattactgttaatccagttcagagcaccatcactgaagaaaccttccagacgctgctggtcagtcgtgcgctggagaaattaggttataccgtcaacaaacccagcgaagtagattacaacgttggctacaccagccttgcttccggcgatgcaaccttcaccgccgtgaactggacgccactgcatgacaacatgtacgaagctgccggtggcgataagaaattttatcgtgaaggggtatttgttaacggcgcggcacagggttacctgatcgataagaaaaccgccgaccagtacaaaatcaccaacatcgcacaactgaaagatccgaagatcgccaaactgttcgataccaacggcgacggaaaagcggatttaaccggttgtaaccctggctggggctgcgaaggtgcgatcaaccaccagcttgccgcgtatgaactgaccaacaccgtgacgcataatcaggggaactacgcagcgatgatggccgacaccatcagtcgctacaaagagggcaaaccggtgttttattacacctggacgccgtactgggtgagtaacgaactgaagccgggcaaagatgtcgtctggttgcaggtgccgttctccgcactgccgggcgataaaaacgccgataccaaactgccgaatggtgcgaattatggcttcccggtcagcaccatgcatatcgttgccaacaaagcctgggccgagaaaaacccggcagcagcgaaactgtttgccattatgcagttgccagtggcagatattaacgcccagaacgccattatgcatgacggcaaagccagtgaaggcgatattcagggacacgttgatggttggatcaaagcccaccagcagcagttcgatggctgggtgaatgaggcgctggcagcgcagaagtaatttttattcgggcggataaggcgtttttgccgcatccgccgttctgtgcacaatgcctgatgcgacgctggcgcgtcttatcatgcctacaaaccacatcgcacatttcaacaatctatctttcatcccatattcatcaacatccgctattattgatttccagcttaatcatcacctgatgaacaaaaataatgactaaacctaatcatgagcttagcccggcgctgatcgtgctgatgtctatcgccaccggtctggcggtagccagtaactattacgcccagccattgctcgacaccatcgcgcgtaacttttccctttccgccagtagcgcaggctttattgttaccgccgcgcagttgggctatgccgcaggtctactgtttcttgttcccctcggtgatatgtttgaacgccgccgcctgattgtcagcatgaccttactggcggcatgttgattaccgccagcagtcagtcgctggcgatgatgatcctcggtacggcattaaccggtttattcagtgtcgtggcacaaattctggttccgctggcagcgacgctggctagtccggataaacgcggcaaagtggttggcactattatgagcggtctgctgttggggatcttgctggcacggacagttgccggattgctggcgaatctcggcggctggcgcaccgtcttttgggttgctagcgtgttaatggcactgatggcgctggcattatggcgtggtctgccacaaatgaaaagtgaaacccacctcaactacccacagttgttgggttccgttttcagtatgtttatcagcgataaaattctgcgtacccgcgcgttgctgggctgcctgacctttgccaatttcagcattctctggaccagtatggcctttttgcttgccgctccaccttttaactacagcgatggtgtcattggtctgtttggacttgcgggagctgccggagcgttgggcgctcgtccggcgggcggttttgccgataagggcaaaagccaccacaccacaactttcggtctgctgctgctattacttagttggctggcgatctggtttggtcacacttccgtactggcgttgattatcggaatcctggtgctggatctcaccgtgcagggcgtgcatatcactaaccagacggtaatttatcggatacatcctgatgcgcgcaatcgcctgaccgcaggttacatgactagctactttattggcggtgccgccggtagcctaattagtgccagtgcctggcaacatggcggttgggctggcgtttgtctggctggcgcgacgattgccctggttaacttactggtctggtggcgaggttttcatcgtcaggaagccgcaaattaagcaatcagcaaccgttttcgtggctttacacttataagggtgttaagaagcccatcagtctgataaggttaagatattcattcagtctatttataatattaacaatcgttaagcgtacactctatggaaagccctactccacagcctgctcctggtagcgcgaccttcatggaaggatgcaaagacagtttaccgattgttattagttatattccggtggcctttgcgttcggtctgaatgcgacccgtctgggattctctcctctcgaaagcgtttttttctcctgcatcatttatgcaggcgcgagccagttcgtcattaccgcgatgctggcagccgggagtagtttgtggattgctgcactgaccgtcatggcaatggatgttcgccatgtgttgtatggcccgagtctgcgtagccgtattattcagcgtctgcaaaaaagcaaaaccgccctgtgggcgtttggcctgacggatgaggtttttgccgccgcaaccgcaaaactggtacgcaataatcgccgctggagcgagaactggatgatcggcattgccttcagtagttggagtagctgggtatttggtacggtaataggggcattctccggcagcggcttgctgcaaggttatcccgccgttgaagctgcattaggttttatgcttccggcactctttatgagtttcctgctcgcctctttccagcgcaaacaatctctttgcgttaccgcagcgttagttggtgcccttgcaggcgtaacgctattttctattcccgtcgccattctggcaggcattgtctgtggctgcctcactgcgttaatccaggcattctggcaaggagcgcccgatgagctatgaggttctgctgcttgggttactagttggcgtggcgaattattgcttccgctatttgccgctgcgcctgcgtgtgggtaatgcccgcccaaccaaacgtggcgcggtaggtattttgctcgacaccattggcatcgccagcatatgcgctctgctggttgtctctaccgcaccagaagtgatgcacgatacacgccgtttcgtgcccacgctggtcggcttcgcggtactgggtgccagtttctataaaacacgcagcattatcatcccaacactgcttagtgcgctggcctatgggctcgcctggaaagtgatggcgattatataacccacaagaatcatttttctaaaacaatacatttactttatttgtcactgtcgttactatatcggctgaaattaatgaggtcatacccaaatggatagtagctttacgcccattgaacaaatgctaaaatttcgcgccagccgccacgaagattttccttatcaggagatccttctgactcgtctttgcatgcacatgcaaagcaagctgctggagaaccgcaataaaatgctgaaggctcaggggattaacgagacgttgtttatggcgttgattacgctggagtctcaggaaaaccacagtattcagccttctgaattaagttgtgctcttggaagttcccgtaccaacgcgacgcgtattgccgatgaactggaaaaacgcggttggatcgaacgtcgtgaaagcgataacgatcgccgctgcctgcatctgcaattaacggaaaaaggtcacgagtttttgcgcgaggttttaccaccgcagcataactgcctgcatcaactctggtccgcgctcagcacaacagaaaaagatcagctcgagcaaatcacccgcaaattgctctcccgtctcgaccagatggaacaagacggtgtggttctcgaagcgatgagctaacgcgtcatctcgctcaaaaatccagatttataaaagaaaaaatgactggccagcatcgcaacatgctggcctttttggcaagcaggtcggctcagccgatgagttaagaagatcgtggagaacaatatgagcgcaaatgcggagactcaaaccccgcagcaaccggtaaagaagagcggcaaacgtaagcgtctgctcctccttctcaccttgctctttataattattgccgtagcgatagggatttattggtttttggtactgcgtcacttcgaagaaaccgatgacgcatacgtggcagggaatcaaattcaaattatgtctcaggtgtctggcagcgtgacgaaagtctgggccgataacaccgattttgtaaaagaaggcgacgtgctggtcactctcgacccgacagatgctcgccaggcgtttgaaaaagccaaaactgcactggcttccagcgttcgccaaacccaccagctgatgattaacagcaagcagttgcaggcgaatattgaggtgcagaaaatcgccctcgcgaaagcacaaagcgactacaaccgccgtgtgccgctgggcaatgccaacctgattggtcgcgaagagctgcaacacgcccgcgacgccgtcaccagtgcccaggcgcaactggacgtcgcgattcaacaatacaatgccaatcaggcgatgattctggggactaaactggaagatcagccagccgtgcaacaggctgccaccgaagtacgtaacgcctggctggcgctggagcgtactcgtattatcagtccgatgaccggttatgtctcccgccgcgcggtacagcctggggcgcaaattagcccaacgacgccgctgatggcggtcgttccagccaccaatatgtgggtggatgccaactttaaagagacgcagattgccaatatgcgtatcggtcagccggtcactatcaccacggatatttacggcgatgatgtgaaatacaccggtaaagtggttggtctggatatgggcacaggtagcgcgttcagtctgcttccagcgcaaaatgcgaccggtaactggatcaaagtcgttcagcgtctgcctgtgcgtatcgaactggaccagaaacagctggagcaatatccgctgcgtatcggtttgtccacgctggtgagcgtcaataccactaaccgtgacggtcaggtactggcaaataaagtacgttccactccggtagcggtaagcaccgcgcgtgaaatcagcctggcacctgtcaataaactgatcgacgatatcgtaaaagctaacgctggctaatccagaggtgcgtgtgatgcaacagcaaaaaccgctggaaggcgcgcaactggtcattatgacgattgcgctgagtctggcgacattcatgcaggtgctggactccaccattgctaacgtggcgatccccactatcgccgggaatctgggcagtagcctcagccagggaacgtgggtaatcacttctttcggggtggcgaatgccatcagcatcccgcttaccggctggctggcaaagcgcgtcggggaagtgaaactgttcctttggtccaccatcgcctttgctattgcgagctgggcgtgtggtgtctccagcagcctgaatatgctgatcttcttccgcgtgattcaggggattgtcgccgggccgttgatcccgcttagccaaagtctattgctgaataactacccgccagccaaacgcagcatcgcgctggcgttgtggagcatgacggtgattgtcgcgccaatttgcggcccgatcctcggcggttatatcagcgataattaccactggggctggatattcttcatcaacgtgccgattggcgtggcggtggtgttgatgacactgcaaactctgcgcggacgtgaaacccgcaccgaacggcggcggattgatgccgtggggctggcactgctggttattggtatcggcagcctgcagattatgctcgaccgcggtaaagagctggactggtttagtagtcaggaaattatcatccttaccgtggtggcggtggtggctatctgcttcctgattgtctgggagctgaccgacgataacccgatagtcgatctgagcttgtttaagagccgcaacttcaccatcggctgcttgtgtatcagcctcgcgtatatgctctacttcggcgctattgttctgctgccgcagttgttgcaggaggtctacggttacacggcgacctgggcaggtttggcctctgcgccggtagggattattccggtgatcctgagcccgattatcggccgcttcgcgcataaactggatatgcggcggctggtaaccttcagctttattatgtatgccgtctgcttctactggcgtgcctatacctttgaaccaggtatggattttggcgcgagcgcctggccgcagtttatccaggggtttgcggtggcctgcttctttatgccgctgaccaccattacgctgtctggtttgccaccggaacgactggcggcggcaagcagcctctctaactttacgcgaacgctggcggggtctatcggcacgagcataaccacgaccatgtggaccaaccgcgagagcatgcaccatgcgcagttgactgagagcgtaaacccgttcaacccgaatgcccaggcgatgtacagtcaactggaagggcttgggatgacgcaacagcaggcaagtggctggattgcccagcagatcaccaatcaggggctgattatttccgccaatgagatcttctggatgagtgccgggatattcctcgtcctgctggggctggtgtggtttgctaaaccgccatttggcgcaggtggcggcggaggcggtgcgcactaagtacaactaagccagttcatttgaactggcttttttcaattaattgtgaagatagtttactgattagatgtgcagttcctgcaacttctctttcggcagtgccagttcttcgttgctgttgatgcgtacgtcacgttccagaatgctacgcgcaatatcctgcgcttcctgcaagctgtgcatctggtaagtgccacactggtagacgttcagttccgggatctgattctgatcctgcactttcagcacgtcttccattgccgttttccaggcatcagcaacacgctgctcatctggcgtaccaatcagactcatataaaaaccggtgcggcagcccattgggctgatatcgataatctctacaccattaccgttaagatggttacgcataaaaccagcaaacaggtgctccagggtatggatccctctttctggcatcacttctttgttcggcacgcagaagcgcagatcgaacacggtgattgcgtcgccatgcggggtgttcattgttttcgccacccgaactgcaggcgcttccatccgggtatgatcgactgtgaagctatctaacaacggcatttagccacctccggtaatttttttaaaaattttctgaactctttcttcccaggcgagtctgagtatatgaaagacgcgcatttgttatcatcatccctgaattcagagatgaaattttggccactcacgagtggcctttttcttttctgtcaggcgtgtttttccagccacaccgcaaacggttcggtatcagcggcttccatttcctgctgacggcgttcagacgcctcgcgctcggctacaaaatcctcttcgcgcagaatttccagcggctcttcacgcagcagattacggtaggcttctgcaaatgctttgcctgttccgccaataccagtatcaatcatagaccttaagatacgggcagagaaagtcagatcgggattatcgaagcaggcaaccagttcatcacacactttctgatacgcttcgccgccgttaatactatccagcgtttgcgcgacgcgtttcagatcgcggaacagatctttacccacctgcggtaacgggaactgtgcggtttcgcagccgatacccagcgtcagacccggtttgcgaccttcgaggatcacccggttccagttaacgcgtgtacaggcaagttcgctactgctcatttccggtgcatcagccagcgcacaccagaccataaacaggtcgaggaatcgcacctgctgttcatctacaccaatcgggctgaacgggttgatgtccaggctacgcacttcaatatattcaatgccgccacgtaacagcgcatcagaagggctctcgccgctgcgggtaacgcgttttggacgaatcggcgcgtacagttcgttttcaatctgcaacacgttgctgttgatttgcagcctcttaccgtctttctcaataccaatcttcgcgtactcttcgcttggcgttttgattgcctgtttaaggcccgctacgtactcgtaaagatcgttgaaggtaataccaagattgctttggcttttattggtatagccgagatcgctcaaacgaagagaggtcgcatacggcaggtaatacataccgcactcggttttctcaaacggcaggctcgttggttttccttgcaggaaagaagaacaaatcgccggagatgcaccaaacagataaggaatgacccaaccgaaacgatagtaattgcggataacgcggaaatagcccgcagaaattttctctttggcatcagcgccgctgatatcaccgcacttcgcttgccagaatgccattggcaaagagaaattgtagtgcacgccggaaatggtttgcatcagcgcgccgtagcgatttttcagcccttcacgatacagcgttttaaagcgtccggtgttagaagtgccgtactgtgccagttcgatgtcctgaccttctgcgatgtagcatggcatacttaacggccacatccgctcatcgcccatattgcgcgccgtataacgatgcagatcgcgcataaaggtcagcatatgttcaatatcaccatccactggtgtaatgaattccagcaatgcttccgcaaaatcggtagtaatccatttgtgcgtcagtgcggaacctaatgcttcaggatgacctgttgttgccagtgtgccatcagcattaacacgcaaagtttcgcgctccagcccacgctgtatcccctttaacgcctgaggatgtttttccagccaggccagcgcctgacttacgtccgggatcaaattgacctcccgcctgtcaaaatcgttttaattagcataactgtaatggtgaccatatgtgcaggcctacaattagtgccaccacatcatgccctgaacggtcgctgctgcaactgcaacatagcgtaacgctttaccaaggcacaaaaaaaagattaccggtccccagctgatgcgcatccatcccgctaacagacacagtaaatcgccaaccacgggcatccagcttaataatagcgtgactgcaccatagcgtttcagccagccggtagctttctcttgccagcggcttgttttacgcaatggaaagaaacgcccaaggataacgttagttaaccctccaaggctattacccattgttgctgttaaaactaaaacccagggatgactgatcccggaaagcaacattgccaccagcacgacttcggagttgccgggtaatagtgtagcgctgagaaaactactggcaaacaagctgaaaaggcttaacgcttcactcacagcaagcgaacatccacggcgtccatgcctgctgcacgggccgcctgaataccgaaatcggcatcttcaaagaccacacactgcgtcggttgcacgcccatacgctgcgcgcacaacaaaaatgtgtctggcgcgggtttatggtgtttgacgtgatcggcagcgacgacggcgtcaaaataatggcgtaatcccaggtgcgccagcaatgcctcagcgatggcgctttcactccccgttcctacagccattgggcgacgaccatgccaacttttcaccacatcaacaagaggaagcggttcgacgctatccagcagcatacttcttactgcttctgttttttcacgcgctaacgcatgcgggtcgagatcggcctgattcagctcaataattgcctgagcaatacgccaggtggggcttccattaagcgcaatcatcgcctgaatatcgtactgaagaccgtagtgccctaatacttcgcgccacgctttacggtgcgtaggctccgtatccaggattgtgccatccatatcaaaaattaaacctgcataacgctcgtacatggtcttctcgcaagtcgaaaaatatgacgctactttagcgtaattgcttgattttgtcgctgatggcgaaggagaagaaaattcaggaaatggataaaggagttatttagaaatgagatatttttgaaggaaattttttggagaagatggtgcatccgggaggatgactcactgacgttcgcccttcgggccgttgctggcgcaacgttatccttcctggtgcctgcggttaataccgctatctcttcgataccttcattgctgaaggttacggagaatatggtgcatccgggaggattcgaacctccgaccgctcggttcgtagccgagtactctatccagctgagctacggatgcatcgggaaaacttattctactgctgatattgataccgctactaaagccatatcaattaagagatggtgcatccgggaggattactcgccttgcggctcgcccttcgggccgttgctaaagcaacgttatcatccctagtgcctgcggttaattccgctacctcttcgataccttcattgctgaagatttcggagaatatggtgcatccgggaggattcgaacctccgaccgctcggttcgtagccgagtactctatccagctgagctacggatgcatcgggaaatttattttactgctgatattgataccgctactaaagccatatcaagtaagagatggtgcatccgggaggattcgaacctccgaccgctcggttcgtagccgagtactctatccagctgagctacggatgcatcgggaaacttactttactgcagattttttgataccgctactaaagccgtatcaagtaagagatggtgcatccgggaggattactcgccttgcggctcgcccttcgggccgttgctaaagcaacgttatcctccctggtgcctgcggttattaccgccacctcttccataccttcatcgctgaaagtacgtagaatatggtgcatccgggaggattcgaacctccgaccgctcggttcgtagccgagtactctatccagctgagctacggatgcaaatggcggtgaggcggggattcgaaccccggatgcagcttttgaccgcatactcccttagcaggggagcgccttcagcctctcggccacctcaccacacgcctcttacgagtgcttcgaagaacttgtttatcgctcatcgtcgctgcgtggcgcacatattactttctgagacttataagtcaaacaatttttcctacacttttatcgtttgcacacttcacgttcaattagtctgtaaaaacgtcaaaaagagtgttttatcaacagaagaatggaggtctgacagatagtagtaatgcaaaaaaatggagacttaagttgaatgaacgggagtaaagcgaaaagactatagagtgaaggagaaattttgagggtgcgtctcaccgataaagatgagacgcggaaagattagtaactggactgctgggatttttcagcctggatacgctggtagatctcttcacggtgaacagaaacttccttcggggcatttacgccaatacgtacctggttgccctttacccctaaaactgtcacggtgacctcatccccaatcatgagggtctcaccaactcgacgagtcagaatcagcattctttgctccttgaaagattaaaagagtcgggtctctctgtatcccggcattatccatcatataacgccaaaaagtaagcaatgacaaacacattacatctaagcagtcatggcattacattctgttaaacctaagtttagccgatatacacaacttcaacctgactttatcgttgtcgatagcgttaatgcgaatgccgtgaagcgagtccacggcattgcctgacgcttatattattgcaatttcgcgctgacccagcctttcacactggctaacgctgcaggtaaggccgcagcatccgtaccaccggcttgcgccatgtcaggacgtccaccacccttgccgcccacctgctgagcgaccataccaatcagttcccctgctttcacacgatctgtgacgtccttagatacgcctgcaatcagagaaaccttaccttcgactaccgttgccagcacgataattgtgctccccagctgattttttaaatcgtcaaccatggtacgcaacattttcggctcaacaccgctaagctcgctaaccaacagcttaacaccattaacatcaattgccttactggaaagatttgcgctctcctgtgcggcagcttgttctttaagctgttgtaactctttttccagctgacgcgtacgttccagtacactgcgcactttatcagccagattattgctatcgcctttcagcagatgcgcgacttcgcttaagcgatcgctgtctgcatgaacggtggcgatagcaccttctccggttaccgcttcgatacgacgaacgcctgcagcagtaccgctttcagagatgatgcggaacagaccaatatcaccagtgcggctggcgtgagtaccgccacacaactcggtagagaaatcgcccatgctcagcacgcgtacgcgctcatcatacttctcgccgaacagcgccatcgcacctttcgctttcgccgcttcgagatccatgatgttggtttcgatcggcaaattgcgacgaatctgtgtgttcaccaggtcttcgaccgcacgaatctcttctggtttcatcgcttcgttgtgactgaagtcgaagcgcagcaccttgtcgttaaccagactacctttctggcttacatgagtacccagaacctggcgcagcgcagcgtgcatcaggtgcgttgcggagtgattcagacgaatacgggcgcgacgagcctcatcaacatcagcctgcaccgcgtcgcccactttcagagaacccgcagcaagtttaccgatgtgaccaatcgcctggccgtatttctgcgtatcttccaccgcaaaggagaagttagcgcctttcagttcgcctttatcgccaacctgaccgccggattccgcatagaatggcgtttgatccagcacgaccacagcttcctggcctgcattgatggcatcaaccgctttaccatcaacaaacagcgcagtcactttgccgttcagttccagatggtcatagcctttaaattcagatgcactgtcaacacggatcattgcgttgtaatcggcaccaaagccgctggcttcgcgcgcgcgacgacgctgctcttccattgcagcttcaaaaccagcttcgtcaactttgatgttgcgctcacgacaaacatcagccgtcaggtcaaccgggaagccataggtgtcgtacagacggaaagcagtttcaccatccagcgtatcaccagaaagttttgccagctcttcatccagcaacgccagaccgcgctccagagtacgagcaaactgctcttcttcagtcttcagcacctgctcaacctgcgcctgctggcgtttcaggtcttcacccgcagagcccataacgtcgatcagcggaccaaccagtttgtagaagaaggtttctttcgcgccgagcatattaccgtgacgcactgcgcgacgaatgatacgacgcagtacataaccacggttttcattggacggcattacgccatccgcgatcaggaacgcacaagaacgaatgtggtcagcgattacgcgcaggcttttattgctcagatcggttgcgccagtgactttcgctaccgcctggatcagcgtgcggaacaggtcgatgtcatagttagagttaacgtgttgcagcaccgcagcaatacgctccagacccataccggtatctacagacggcttcggcagcggttccatcgtgccatcggcctggcggttgaactgcatgaagacgatgttccagatctcaatgtagcggtcgccgtcttcttccgggcttcccggagggcccccccaaatgtggtcgccgtgatcgtagaagatttcggtgcacgggccgcacggaccagtgtcacccatctgccagaagttgtcagatgcgtatggcgcacctttgttatcgccgatgcgaataatacgttcgcgcgggatccctacttctttttcccagatttcgtaggcttcgtcgtcgctttcatagacggtaacccacagacgctctttcggcagggcaaaccatttttcgctggtcagcagttcccatgcaaactgaatggcatcgtgtttgaaatagtcgccgaagctgaagttgcccagcatttcgaagaaggtatggtgacgcgcggtgtaaccgacgttttccaggtcgttgtgtttaccacccgcacgcacgcagcgttgggaagtggtagcgcgggaataattacgcttgtcgagcccaaggaacacatccttgaactggttcatcccggcgttggtaaacaacaaagttgggtcgttatggggtaccagggagctgctggcaactacctgatgtcccttactatggaaaaagtcgagaaacgcctgacggatctcagcggtgctcttgctcataattatcctgaaatcaagctaacgaaatatcgccaccagctccagcgtgtcttaaccgccgggctggtaactgaaaagtgggaataagataagttttcttgactgggaagtaaaataccgtatgcgttcagtcggcaaaatttcgccaaatctcctggatatcttccatcagatagccacgatagagcagaaaacgctggatcttaactttttcactaaagacagttggcaaaggttcgccatattttcgcgtcgcctgatcgcgcgccagtgcgcaccagtcgatgtcacattcacgcatcgctttttctgtcgcttcgcgggaaatacctttctgattcagttcctggcgaatacgcgcaggtccataacctttgcggctacggctggcgataaagcgcgcaacaaatcggctgtcatcgagatagccatgttcatggcaccaggcaataacgcgctcgtaatcttctgccgtagcatcaatctcttctgggccatttttgcccataatcggtgccgcgagtttacgtcgcagttcttgctcactgtgatcgcgcaccgccagaatgcgtaccgcacgatccaacaggcgagcatatgccgggcgacgggatgtactttctgtcatggcatatccttacaacttaaaaaagcaaaagggccgcagatgcgacccttgtgtatcaaacaagacgattaaaaatcttcgttagtttctgctacgccttcgctatcatctacagagaaatccggcgtactgttcgggttgctcagcagcaactcacgtactttcttctcgatctctttcgcggtttccgggttatctttcagccaggcagtcgcattcgctttaccctgaccgatcttctcacctttgtagctgtaccacgcgcctgctttctcgatcagcttctcttttacgcccaggtcaaccagttcgccgtagaagttgataccttcgccgtagaggatctggaattcagcctgtttaaacggcgcagcgattttgttcttcaccactttcacgcgggtttcgctacccaccacgttttcgccctctttcaccgcgccgatacgacggatgtcgagacgaacagaggcgtagaatttcagcgcgttaccaccggtagtggtttccgggttaccgaacatcacaccaattttcatacggatctggttgatgaagatcagcagcgtgttggactgcttcaggttacccgccagcttacgcatcgcctggctcatcatacgtgccgcaaggcccatgtgagagtcgccgatttcgccttcgatttccgctttcggcgtcagtgccgccacggagtcaacgacgataacgtctactgcgccagaacgcgccagggcgtcacagatttccagtgcctgctcgccggtgtccggctgggagcacagcaggttgtcgatatcgacgcccagtttacgtgcgtagattgggtccagcgcgtgttcagcatcgataaacgcacaggttttaccttcacgctgcgctgcggcgatcacctgcagcgtcagcgtggttttaccggaagattccggtccgtagatttcgacgatacggcccatcggcagaccacctgccccaagcgcgatatccagactaaggctaccggtagagatggtttccacatccatggaacggtcttcacccaggcgcatgatggagcctttaccaaattgtttctcaatctggcccagtgctgccgccaacgctttctgtttgttttcgtcgatagccatttttactcctgtcatgccgggtaataccggatagtcaatatgttctgttgaagcaattatactgtatgctcatacagtatcaagtgttttgtagaaattgttgccacaaggtctgcaatgcatacgcagtagcctgacgacgcaccgcatcacggtcgccgctgaagcattcccgccgggtaatgccttcaccgcgggcagtggcaaaagcaaaccagacggtgccgacaggcttctcttcactgccgccatccggcccggcgataccactaatagacacggcataatcagcacgagccgctttcagtgcgcctatcgccatttccaccacgacgggttcactcaccgcgccatgctgcgccagcgtctcttcgcgtacgccgatcatctgcgctttggcttcgttactgtaggtgacaaatccgcgttcaaaccaggcggagctaccggcaatatcggtaatcactttcgctacccaaccaccggtacaagactcggcagttgttacggttgcgccacgggctttcagcgcctgcccaacctgttcacttaactgcatcagttcactgtcagtcatcacaacctctgtcagtcaaaaatttatgccggacaagatagcactttcgtcaggaagatggtgttggcgttgcaattttacgaggaggattcagaaaaaagctgattagccagagggaagctcacgcccccctcttgtaaatagttactgtactcgcgccagcgccacggcttgtcctaactgccagaccgccattgcgtaatgggtgctgtggttgtaacgggtgatggtgtagaagttcggcagaccgtaccagtactggtagccggtgccaacatccagacgcagcaggctggcttgttgatggttgcccagcggctgctgtggcgttaaacctgcggcggcaagctggctaatgctgtacttagttttgaagccatttggcaagcctggagcctgaccgtttgccattaccgcgacctgatcgcctttcacccagccgtgcgctttgaaatagttcgccacgctaccgatcgcatcaaccggatcccacaggttgatatgcccgtcgccgctgaaatctaccgcatattgtttgtaagagctcggcataaactgtccgtagcccatcgccccggcaaaggaacctttcagattgagcggatcgtcctgctcgtcgcgcgccatcaacaggaaggtttccagctcgccagagaaatactccgcgcggcgtgggtagttaaaactcagcgttgccagcgcatcgaggatgcgagttttccccatcacgcgcccccagcgggtttcaacgccgataatcccgacgataatttccggcggtactccatacacctgccacgcgcgattcaacgcatcttcatactgattccagaaaaccacaccgttctgcacgttgtccggcgtaataaattttttgcgataacggagccatgcgccgttcggaccacttggcggtttcacgcttgtggttggtgcctggttatccatcagccgcagtacgctatccagacgcttcgcctgggagagaatttcctgcaactgctgacgatcgaaaccgtgtttgttcaccattttgtcgatgaactgctgggcattcgggttattagcgaaatcgccgcccatctgcatcacattgtgctgcggctcaagcaggaagccgccagacggcgttccggtggtcgtatcagtctcagtaggttttggcttgctgctacaggcggcaagcaacacaaaaaggggaagcaatgttacataacgacgcttgaacatgaggggtccatttaacagattcaaccaggggcaagtatggtaaagcatcacgccccgcacaaggaagcggtagtcactgcccgatacggactttacataactcaactcattcccctcgctatccttttattcaaactttcaaattaaaatatttatctttcattttgcgatcaaaataacacttttaaatctttcaatctgattagattaggttgccgtttggtaataaaacaataaatcctgaaggagagaacaatgatagaaaccattactcatggtgcagagtggtttatcgggctgttccaaaagggcggagaggtgtttaccgggatggtgaccggcattcttccgctgttgattagcctgctggttatcatgaacgcactgattaattttatcggtcagcatcgtattgaacgttttgctcaacgttgcgccggtaaccctgtttcccgttacctactgttaccgtgcattggcacgtttgtcttttgcaatccgatgaccctaagcctgggtcgctttatgccggaaaagtacaaacccagctactacgcggcggcctcttatagctgccacagtatgaatggcctcttcccccatatcaaccctggcgaactgtttgtttatcttggcattgccagcggtctgacaacgctgaacctgccacttggcccactggcggtgagttatctgctggttggtctggtcaccaatttcttccgcggctgggtgaccgatctgaccaccgccatttttgagaaaaagatgggcattcaacttgaacaaaaagttcacctggcaggagcaacaagttgaaataacacctggcaggagcaacatcatgacgcatattcggatcgaaaaaggaacgggtggctggggcggcccgcttgagctgaaagccacgccgggaaaaaaaatcgtctatatcaccgccggtacccggcctgcgattgttgacaaactggcacagcttactggctggcaggctattgacggatttaaagaaggtgaacccgcggaggtggaaattggtgtcgcggtaatcgactgtggcggcacattacgctgcggcatctatccgaaacgacgtattcccaccattaatatccacagcacgggcaagtccggtccgctggcgcagtacattgtggaagatatttatgtctctggcgtaaaagaagaaaacatcactgtagtaggtgatgcgacaccacaaccctcttccgtgggccgtgactatgacaccagtaagaaaatcaccgaacaaagcgatggtttactggcgaaggtgggaatgggcatggggtccaccgttgcggtgctgtttcaatctggtcgtgacaccatcgacactgtattaaaaaccattctgccgtttatggcattcgtcagcgcgctcattggcatcattatggcttctggccttggtgactggattgcccacggtcttgctccgctggcgagccatccactgggtctggtcatgctggcgctcatctgttccttcccactgcttagtcctttcctcggcccaggcgcagttatcgcacaggttatcggcgtattgattggcgtgcagattggtctcggcaatattccgccgcatctggctttaccggcactgtttgccatcaacgcgcaggcggcctgcgacttcatcccggtcggtttgagcctggcggaagcccgtcaggacacggttcgcgtcggtgtcccttctgtactggtgagccgctttttaaccggcgcgccgactgtactgatcgcctggtttgtctccggttttatctatcaataaaggctgaaacatgaccgttatttatcagaccaccatcacccgtatcggcgcgagtgccattgacgccctcagtgaccagatgctcatcacctttcgtgaaggcgcgcctgcggacctcgaagagtattgcttcattcattgccacggcgagttgaaaggtgcactccatcccggtttgcaatttagtctcgggcagcatcgctatccggtgaccgctgttggcagcgtggcggaagacaaccttcgcgaactgggtcatgtcaccctgcgcttcgatggtttaaacgaagcggaatttccgggcactgtccatgtggcaggccctgtccccgacgatatcgcgccgggaagcgttttgaagtttgaatctgttaaggagtaaaaaatgaatcaggttgccgttgtcatcggtggtgggcaaaccttaggcgcgttcctgtgccacggtctggctgccgaggggtatcgcgtcgcggttgtcgatattcagagcgacaaagccgcaaatgtggcacaagaaattaacgccgaatatggtgaaagtatggcgtacggttttggtgctgacgccactagcgagcaaagcgttctggcgctctctcgtggggtagatgaaatctttggtcgcgtggatttgctggtctacagcgccggaatagcaaaagcagcctttatcagcgacttccagctcggcgattttgaccgtagcctacaggtgaatctggtgggttatttcctgtgtgcgcgtgaatttagccgtttgatgatccgcgacgggattcaggggcgcattattcagatcaacagcaaatccggcaaagtgggcagcaaacacaactctggctacagcgcagcgaaatttggtggcgtcgggctgactcaaagtctggcgctggatctggcggagtacggcattacggtgcatagtctgatgctcggtaacctgctgaaaagcccgatgttccagagtctgttgccacaatacgcgaccaagctgggtatcaaaccggatcaagtcgagcagtattacatcgacaaagtaccgctcaaacgcggctgcgattatcaagatgtgctgaatatgctgctgttctacgccagtcctaaggcgagctactgcaccggacagagcatcaatgtcaccggcggtcaggtgatgttctgatcaacagcggagatccattaaggatctccgtgagactatagaatgcctgatgcgctacgctcatcaggcatacaggacttccgccactacattaaggaaaagttatggtatccgcactcatcaccgtcgccgttatcgcctggtgtgcgcaactggccttaggcggctggcaaatttctcgttttaaccgtgccttcgacacactatgccagcaagggcgggttggcgtgggccgttccagcgggcgctttaaaccgcgggtcgtggtcgccatcgcgctggacgatcagcagcgcatcgtcgacaccttgtttatgaaaggactgaccgtcttcgcccgaccgcaaaaaattcccgcaattaccggtatgcatgcgggtgatttacagcccgatgtgatctttccccatgatccactaagtcagaatgctctaagtttggcgcttaaactgaaacgtggataatttcgttgtgaatgttacttgcttgcgaagttatcattttgaaacctaaatcaggtaatcacgcccatgaaacctcgtcagcgtcaggccgccattctggagtatctgcaaaagcagggtaaatgcagcgttgaagaattggcgcaatactttgacaccacaggcacaaccattcgcaaagatctggtcattctggaacatgccggaaccgtcattcgtacttatggcggagtggtgttgaataaagaggaatccgatccgcctatcgatcataaaacactcatcaacacccacaagaaagagctgattgcagaagctgccgttagttttatccatgatggcgatagcatcattcttgatgctggcagtaccgttttgcagatggttcccctgctcagccgctttaataacatcacggtgatgaccaacagcctgcatatcgtcaatgcgctatccgaactggataacgaacaaactatcctgatgccaggcggaacgtttcgcaaaaaaagcgccagttttcacgggcaactggcagagaatgccttcgagcatttcaccttcgataaattgtttatgggcaccgacggcatcgatctcaatgcgggcgtaaccacctttaacgaggtttataccgtcagtaaggcaatgtgcaatgccgcgcgcgaagtgattttgatggcggacagtagtaagtttggccgtaaaagccccaacgtagtttgcagtcttgaaagcgtcgataagctgattaccgacgcaggtatcgatccggcgtttcgtcaggcgctggaagagaaagggatcgatgtgatcataaccggagagagcaatgagtgaagcactactgaacgcgggacgtcagacgttaatgctggagttgcaggaagcaagccgtttaccggaacgtctgggcgatgattttgttcgcgccgccaatatcatcctgcactgtgaaggcaaagtggtggttagcggaattggcaaaagcggccacattggtaagaaaatcgccgcaacgcttgccagtaccggcactccggctttttttgtccatccggcagaagcgctgcacggcgatctggggatgatcgaaagccgcgatgtgatgctgtttatctcttactccggtggcgcgaaggaactggatctgattattccgcgtctggaagataaatctatcgcgctgctggcgatgaccggcaaaccgacgagtccgctgggcctggcggcaaaagcggtgctggatatctccgtagaacgcgaagcctgcccgatgcaccttgcgccgacctccagcaccgtcaataccctgatgatgggtgacgcgctggcgatggcggtcatgcaggcgcgcggatttaatgaagaagattttgcccgctcccacccagccggggcactgggcgctcgcttgctgaataaagtgcatcatctgatgcgccgtgacgatgccatcccacaggtggcgttaaccgccagcgtgatggatgcgatgctggaactcagccgcaccggtctggggctggtggcggtatgtgacgctcaacaacaggtacaaggcgtctttaccgacggcgatttacgtcgctggctggttggcggcggcgcactcaccacgccagtcaatgaagcgatgacggtcggcggcaccacgttgcaaagccaaagtcgcgccatcgacgccaaagagatcctgatgaagcgcaaaatcactgccgcaccggtggtggatgaaaacggcaaactcaccggcgcaataaacctgcaggatttctatcaggccgggattatttaatccttcaatcccagacgtttcgccagccgatgcaggttggcgacgtcggtttccagcatccgcgcgcaggcagcccagttgtgatgattttgtgccagtgcctgacgaatagtttcacgctggaacgcttctgtcgcttcacgcaggttttgcttaacaacgggcaccgccgccacttctggcgtcggcaacgtcacctcaggaaaagcaaaatgttgcgcctcaagaatcacttcatcgccgctgcgggtggctctcgccagaactaccgcccgatgaatagcatgttccagttcgcgcacgtttcccggaaaactgtagtgttgcagtaaatttcgcgctccggcacttaataccacgcgggagagcccctgccgcaaacgacactgctcgcagaaataccccgccagcagaatgacatcatcgccccgctcacgcagcggcggcacgctaagtggaaacacgctcaggcgatgaaacaaatcggcgcggaatcgccctgccagcacctcttcgcgtaaatcgcggttagtcgccgccagcacgcgcacatcgacccgcaaacaacggtcatcgccaacgcgctgaatatcgccatactgcaacaccctcagcagcttggcctgcaatgccaagctcaactcgccgatctcatccagaaacagcgtgccgttatccgccatttcaaacttcccgctgcgattactgatagcgccagtaaacgctcctttcacatgcccgaacaactcactttccgccacactttccggcagtgcagcacagttgagatagaccagcggattcaccgcccgtgggctggcttcatgaatcgctttcgccaccagctccttaccggttccagtctcaccgctgatcaggacgttgagatcggacgccgccacaatctcaatctcttttttcagttgcgtcatgccaggggacaagccaatcatctgcgtctgtttcaccgcttcaaacggcgtggcatcgcctggcagcatattctggctttccagttgttcaatcagcaacgcattgcttaacgctcccgccgccagcgcagcaatcagccgtagctcttcgtcgctgaaaacatcgaactgatcgggctgcatcccgtcgagcgtcagtgcgccgatcaggttttgcccggcaaacaatggcagaccaacgcaggcgtgaaccttcagactctcctgcccaggaatcaaaccgtcatagggatcgggcaattcgctgtctgcgggaaagcgcaccacatccccggcgcgggcaatcgcttccagccgtggatgcccttccagcgcaaagcgtctaccgagtacatcctttgccagaccgtcgatggcaagcggaataaactgccggctatcgtaacgtagcaacgcagacgcatcgcactccagcacctgacgtagcgtggtgatcaggcgctgaaaacgatcctggtgaccaatcccacgctgcaattcgatggcgatattcgccagcacatcaacggaaaaactcatctttgcctcactgtcaatttgactatagatattgtcatatcgaccatttgattgatagtcattttgactactcattaatgggcataattttatttatagagtaaaaacaatcagataaaaaactggcacgcaatctgcaattagcaagacatctttttagaacacgctgaataaattgaggttgctatgtctattgtggtgaaaaataacattcattgggttggtcaacgtgactgggaagtgcgtgattttcacggcacggaatataaaacgctgcgcggcagcagctacaatagctacctcatccgcgaagaaaaaaacgtgctgatcgacaccgtcgaccataaattcagccgcgaatttgtgcagaacctgcgtaatgaaatcgatctggcggatatcgattacatcgtgattaaccatgcagaagaggaccacgctggggcgctgaccgaactgatggcacaaattcccgatacgccgatctactgtacagccaacgctatcgacagcataaatggtcatcaccatcatccggagtggaattttaatgtggtgaaaactggcgacacgctggatatcggcaacggcaaacagctcatttttgtcgaaacaccaatgctgcactggccggacagcatgatgacttacctgacaggcgacgcggtgctgttcagtaacgatgctttcggtcaacactactgcgacgagcatctgttcaacgatgaagtggatcagacggagcttttcgagcagtgccagcgttactacgccaatatcctgacgccgttcagccgcctggtaacaccgaaaattaccgagatcctgggctttaacttaccagtcgatatgatagccacttcccacggcgtggtatggcgcgataacccgacgcaaattgtcgagctgtacctgaaatgggcggctgattatcaggaagacagaatcaccattttctacgacaccatgagcaataacacccgcatgatggctgacgctatcgcccaggggattgcggaaaccgacccacgcgtggcggtgaaaattttcaacgtcgcccgaagcgataaaaacgaaatcctgactaatgtcttccgcagtaaaggcgtgctggtcggcactagcacgatgaataacgtgatgatgccgaaaatcgccgggctggtggaggagatgactggtttacgcttccgtaacaaacgcgccagtgctttcggctctcacggctggagcggcggtgcggtggatcgtctttccacgcgcctgcaggatgcgggtttcgaaatgagccttagcctgaaagcgaaatggcgaccagaccaggacgctctgaagttatgccgtgaacacggtcgcgaaatcgcccgtcagtgggcgctcgcgccgctgccgcagagcacggtgaatacggtagttaaagaagaaacctctgccaccacgacggctgacctcggcccacggatgcagtgcagcgtctgccagtggatttacgatccggcaaaaggcgagccaatgcaggacgttgcgccaggaacgccgtggagtgaagtcccggataacttcctctgcccggaatgctccctcggcaaagacgtctttgaagaactggcaagcgaggcaaaatgagtaacggcattgtgatcatcggtagcggcttcgccgcccgccaactggtgaaaaatattcgcaaacaggacgccactattccattaaccctgattgccgccgacagcatggatgagtacaacaaacctgacctcagccatgttatcagtcaggggcaacgtgccgatgaccttacccgccagacggcgggtgaatttgccgagcagtttaatctgcacctgtttccacaaacctgggtgacggatatcgatgccgaagcccgtgtggtgaaaagccagaataatcagtggcaatacgacaagctagtactggcaaccggtgccagtgcctttgtcccgcctgtgcctgggcgtgagttaatgctgacgttaaatagtcagcaagagtatcgcgcctgtgaaacgcaactgcgggatgcccgacgcgtgttgattgttggcggtggtttgattggtagcgaactggcgatggatttttgtcgtgcaggcaaagcggtcacgctaatcgacaacgctgccagtattctggcgagcttaatgccaccggaagtaagcagccgcttgcagcatcggttgacggagatgggcgttcatctgctgttgaaatctcagttacaggggctggaaaaaacggattctggcattcaggcaacgctggaccgccagcgcaatatcgaagtggatgcggtaattgccgccaccggactgcgcccggaaaccgccctggcacgacgcgccgggctgacgattaatcgcggcgtttgcgtcgatagttatctgcaaaccagtaataccgatatttacgcgctgggcgattgcgcggaaattaacggtcaggtattgccgttcctccagccgattcaacttagcgcgatggtgctggcaaaaaatcttctcggcaataacacgccgctgaaactcccggcgatgctggtgaaaatcaaaacgccggaattaccgctgcatctggcaggcgaaacccagcgtcaggatttacgctggcaaattaataccgaacgccagggaatggtggcgcgcggcgttgacgatgctgaccagcttcgcgcctttgtggtcagtgaggatcggatgaaagaggcatttggattgttgaaaacattgccgatgtaagtgggctactgtgcctaaaatgtcggatgcgacgctggcgcgtcttatccgacctacggggacgcatgtgtaggccggataaggcgtttacgccgcatccggcaatggtgtccaaatgcaacacgttttatccgttctggacttcacccgctaaccaacgcgccgcagcaataaccccctgccccagagacaaaccgccatcacccgccggtaaactctgtggaaagagcaatgtgaaatcagcgagataatgcgccagacgtgcacgcagcaaacggttatgaataaccccgccgctaaataccagcgtagtgataccacgcatcgtggcctgctcacgcatcaacgcggcaaaaccctgcgccagcgtatcatgaaacgcccacgcgcgttgattaaccggtgcctgccagttcagccactgctgccagaaagtggcgagatccagttgattgtccacccgcggcattgtcaccggatgcgtcactccgtggcaactggctgcgagcgcctccagagcacaagccgcttcaccttcataacttaacgtggctggcgcacagcccagtgccgccgccactgcatcgaaaaaacgcccacagctactcgccagcggcgcgttaattccacgctcaatggcccgcgccagcacgctccagttttgctgttgcacacttgctgtttcagagtaattctgccactccggcacaaagcgcaggcactgcgccagcaggtttcgccacggctgcttcgctgccaaatcgccacccggaagcgccactgcaggcaagccgcccaggtgctcacattcgcgatagttcacccgcaggcactcgccgccccacaaagcgccgttctcccccataccgataccgtcgagcgtcaaagcaatgacatcaccgccatccagcggccactgatgctctgccagacacgccgctgcatgggcatgatgatgcagtaccgtttgcgtcggcagattcatttcacgcgcccactggctggagacatagcccggatgcgcgtcatgcacaacgtattgcggggtaaaatcgtagatgttttgcatcaggcgtaacgcttcgcgccactgcatctggatgccatcgtcacttaaatcgcccagatgctgactcaacaccgcttgttcaccgcgcaccaggcagaaggtatttttcagatccgcgccgagacacagcacaggcggaacatttttaaagcccggaggcaaagccagcgcatccggcacatacccccggctacggcgcagcatttcgccgctttcgcgcaccacgctatcatccatccgctgcacgatgtcgcggttatgtatcaagaatccgtcggcaatgccctgcaaatccgccagcgcctgttcgttgctgatagctggtggtttaccgctcaggttgccggaggtcatcaccagcgggcattgcagttcctgtaacagcaaatgctggagcgggttcgcaggcaacattaccccgacttcgttaaggtcaggggcgatatcatcacaaagctcaggaacgtattttttatccaccagcacaatcggcgcggcgggcgtggtaagcaactggcgcgcagcgtctggtaaaccgtcagccactggcaacatgaccgccagcggtttcgccgggcgatgtttgcgcgcccgaagtgtcgccaccgcgttactgttacgtgcatcgcaggcaagatgaaatccgccaatccctttgatggcgacaattttgcccatttttaactgtgcgatagctgcctgtaatgccgcctcttgttccgcatgttcaccatgacttacccattcaagatgcgggccacactccgggcaggccaccggctgggcgtggaagcgacgatcgagcgggtcacggtactctttgtcacaggccggacatagcggaaacgccgccatcacggtaaacgggcggtcgtaaggcatggcgcgaataatggtgaaacgcgggccgcagtgggtacagttgataaacggataacgataacgccgttcgcctggggtattcatttcggcaaggcaagcagggcaagtagcggcatcgggaacaatttgcgtattcatggtgccgcctgtgctctggcgtatagtgaactcggtgggcagttgactccagataaacggctcacgctcgacgctatcaatacgcgccagcggcgggcagtgctgatacaattgaacaagaaacgtttccgggtcttcccgcagccggacttctacgccatcgccgtcattacagacatcgccgtgaagatttaattgctgtgccagctgccagacaaacggacgaaaaccgacgccctgcactttgccacgaatacgcagttggacaccgcaagatgtgttttttgccattgagttattcccgccatcatgaattgcgtaacccgccctgccggacacgacagcgtcgcatccggcagtcacaggtcggcgataccgcccgctccgtattctacgaatatttccgggaattcctttgatgccagaacagttctgtaagatttttagaacatcagcgccgtacggcggcgtttttctgcgctcagttgttcaagtttattacgatcgacacaaatcagcgcatgagtcgggcaagccgccatacacgccgggccgtcttcacgatggttgcacaggtcgcatttattggcttcggctttgtcagcccgtacattcagacccgcgccgctgttgcggatcaccggacgtaccaccacttccatcgcaccatacgggcaagccacaacgcaggttttgcaaccaatgcaacgttcctgcatcacatgaacaaaccctttatcacggctgatagcaccattcgggcagacgttagcgcacggtgcatcttcacactgacggcaaactgtcgccgtggaaatgttcacacctttaatgacatggatacgcggtaaaaaagtttccggggtcaggcttgcacagtcctgattttcctgatgagaaaccacgcacgctacttcacaggtacggcaaccaatacatttactcgcgtcagcaatgatgaaacggttcatcaaattctccagcaatgacagttaatgcgccgatacattcacaaatcatgccagtttttaatttactgttatttaaggaaattaatttctgtaatgcaggaaaaacgatgtcatcgacactagtgacgatgacatgtgatgacaatgtttatcggctaggagcaatgagactgtcgcggcggatcagttttccgctgaaggttttcggcggactgaaatccccgccatcgagcataaaaatcagccgtccaataatttcctgaatcatctcagtcaccggaatttttacgctggagagcgccggaacggtgtagggggcaatagcgatatcatcgaatccgataacactcacctgctctggcaccgctacgccgcgctcgtgtaacgctttcatcgcacctatcgccatatcgtcgttactggcaactaacgcgctaaatttagccccacgttcgagcaacatttctaccccttcggccccgctggcaggcgtccatttaccgttagcgataagtttttcattgagcgcaataccatgctgcgccagcgcgtctttatacccggcaagacgttcaatgttggtgggggaatccatgctgccggtaaggaaagcaatctcctgatgcccggcgtttatcaactctgccacggcgttaaaactggtctgtttatgatcgcaccagacgctatggctgctgtttttgcgcaggcggcgattaagcaccattatcggctgactgtgcgcgtcaatgatgtcatcgatctcatccacgcttaaaaaacgcgggtaaatcatgatcgcgtcgcagcgcagatccagcagatactgaatcgcctggcgctcttcttctgcgctgtgtttaccatctgccaatagcaactgccgccctttctcttccgccattcgcgcggcatgaaagagtaattcactaaaataaatgccgtggtaaagcgtgttggtcactaccagccccagcgtctgagtactcttcgcgctcagattgcgcgccagcaagtttggacggtaaccgctctcttctaccgcctgaaacacgcgatctttagtctcctggctgacgtagccattaccactaagcacgcgggaaacggtcgctttactaaccccggcgcgcttcgccacttccagcatcgtcgtcatcattttcatccctttacacgcaatcaacgcagtgtactgcaccgtttgccgattgtccttgcacaatcggcgggaaaaatattcaggtgaccggtttcacaaatataaaaaatgaacaattcactctcttgcttatttagtgacaactattcatgattttgtgaaaccggtttcttaattccgtttcagcatcggcatttttccgtcacgtcgactgataacaactacatctaccctactgataacaggataaaatccgatggccaaaaattatgcggcgctggcacgcagcgtgatagcggcactgggcggcgttgataacatcagcgcggtcacgcactgtatgacgcggttgcgctttgttatcaaagatgatgcacttatcgacagcccgacgttaaaaaccatccccggcgtgctcggcgtggtacgtagtgacaaccagtgtcaggtgattatcggcaataccgttagtcaagcctttcaggaagtcgtcagcctgctgccgggagatatgcagcccgcacagcccgtgggtaaacccaaactcacgctacgtcgcattggtgcggggatcctcgatgcgctgatcggcaccatgagtccgctgatcccggcgattatcggcggaagcatggtcaaactgctggcaatgatcctcgagatgagcggcgtgctgacaaaaggaagcccgaccttaaccattctgaatgtgattggtgacggtgctttcttcttcctgccgctgatggtcgcggcatctgccgccatcaaatttaaaaccaatatgagcctggcgattgccatcgcgggtgtgctggtacatccgagttttattgaactgatggcgaaagcggcccagggtgaacatgtcgaatttgccctgattccggtcaccgcggtgaaatacacctacacggtgatcccggcgctggtgatgacctggtgcctgagttatatcgaacgctgggtggacagcattacaccggcggtgaccaaaaacttcctcaaaccaatgctgattgtgttgattgccgcaccgctggcaatcctgctgattggcccgattggtatctggatcggtagcgccattagcgcgctggtttacaccattcatggttatctgggctggcttagtgtcgccattatgggcgcgctgtggcctctgctggtaatgaccgggatgcaccgcgtctttacgccaaccatcattcagaccattgccgaaaccggcaaagaagggatggtcatgccgagtgagatcggcgctaacctgagcctgggcggtagtagtctggcagtggcgtggaaaacgaaaaacccggaactgcgtcagacggcgctggctgcggcggcaagtgccattatggcggggatttccgaaccggcgttatatggcgtggcgatccgcctgaaacgtccgcttatcgccagtcttatcagcggttttatttgcggcgcggttgccggtatggcggggcttgccagccacagtatggcagcgccggggctatttaccagcgtgcagttcttcgatccggcgaatccaatgagcatcgtctgggtgttcgcggtcatggcgctggcggtggtgctgagctttatcctcacactgttgctcggctttgaggatattcctgttgaggaagcggctgcccaggcgcgaaagtatcagagcgtacaaccgaccgtcgccaaagaagtaagtcttaattgaggatgaaaatgagtgtatttccagaaagttttttatggggcggcgcgcttgccgccaaccagtctgaaggtgcgttccgtgaaggtgacaaaggtctgaccactgtcgatatgatcccacacggcgagcatcgaatggcggtgaaactggggctggaaaaacgttttcagttgcgagatgacgagttttatcccagccatgaggcgacggatttttatcatcgttataaagaagatatcgccctgatggcagagatgggattcaaggttttccgtaccagtattgcctggagccgtctctttccgcagggcgatgaaatcacgcccaatcagcagggcattgctttttatcgttctgtctttgaagagtgtaaaaagtacggtatcgaaccgctggtcacgttgtgccacttcgatgtgccgatgcatctggtcaccgaatatggctcctggcgtaaccgcaagctggtggagtttttcagccgctacgccagaacctgctttgaagcatttgatggtctggtgaaatactggctaaccttcaatgaaatcaacattatgttgcatagcccgttctccggcgcgggtctggtgtttgaagaaggtgaaaatcaggatcaggtgaaatatcaggccgcgcatcaccagctggttgccagtgcgctagccaccaaaatcgcccatgaggttaacccgcaaaatcaggtgggctgtatgctggcgggcggtaacttctacccttacagttgcaagccggaagatgtctgggcggcgctggagaaagaccgggaaaacctgttttttatcgatgtgcaggcgcggggcacgtatccggcttactctgcccgcgtattccgcgaaaaaggggtaaccatcaacaaagcaccgggcgatgatgaaatcctgaaaaacaccgtcgattttgtctctttcagctattacgccagccgctgcgccagcgcggagatgaacgccaacaacagcagtgcggcgaacgtggtgaaaagcctgcgtaatccgtatctacaggtgagcgactggggctggggaattgatccactcggtctgcgtatcaccatgaatatgatgtacgatcgttatcagaagccgctgtttctggtggaaaacggcctgggcgcaaaagatgaatttgctgccaatggcgagattaacgacgactatcgcatcagctacttacgcgaacatatccgcgcaatgggcgaagcgattgcagacggcattccgctgatgggctacaccacatggggctgtattgatttagtttccgcctctacgggtgaaatgagcaaacgctacggctttgtctttgttgaccgtgacgacgcaggcaacggtacgctgacgcgcacgcgtaagaaaagtttctggtggtataaaaaagtgattgccagtaatggggaagatttagagtaagtaacagtgccggatgcggcgtgaacgccttatccggcctacatgtcgcacgaaccatgaaggcccgataagcgcagcgcatcgggcaatttagcatttggcatcagagctggttcaccccatcaagaacatccctgtcctgattccttaatgaaaaattactcttcttccaccgctaactgcgcgaagccgccatttccttcccagccttccagtcgttgataaacggtttctaccgcatctttaatcggctgggtcatcgggtagtaaaagccgacgatatccggctgaatgccgaggaaaatcacttcgccaatatcttctttcaactggtcgataaggtaattcaacggcatgttatgggtagtcatcataaacatctcggcgatatcatccgggtcgatgatgcggatctcgccggggtttagccccatatccgtggcgtcgacaatcagcagtcgtgtcgggcgcagttcacggatagcgacgatgtcgttttccggtgcgctaccgccgtcaatcaccacccagttacctttcggcgcggcggcgcacttttccgccagcagcggacctgcgccatcatcgcccatcatgctattgccaacacagagtaaaacgtcagtcacgcagtctcctcaccatcaaatagatggcgttttcctgatgaatatcatgcagcatacttaacagcattgtactccattcctgctgctggctagtttgcgctgcccgggctttatcgaatgcgttggccagcatcggcacatggttaatgtcgatgacgatctcaccatatttcggcacgccttccattttgcggcgggcttcactgcctgcctccagagtggcaatccatgccagatattcatcccacgggcaggtgagcgccgcttccaggcaatcgataaccccaaggtggtgaccaatcgccaggctgtaatagaccacctgctgcgcctcggcgggcgtggcatcgttctcatcaataaatttatggctcagttgactgaacaccaccttttcactcatcggatacgcgcctcttcaacaacatgattcagatggctgacaatctcgttcagacgcggatcgttttccgcttccagccagcgtgcaacctgttcttcgccctgccctaactgtgtaaggtaatcatcggcaatctgacgaccgtaacgataacccgccaggcgacgtgcttcgcgatccactttcacgcgcagcggctgcaccatatcaccatgcaggatctccgccggttgttcatccagttcacccggcccacgggcgtgaattttctgctccagcaggccgagcgccattgcaaagccgtacagcgtggcggcaggcgttggcgggcagccagggatataaacatccacagggacaattttatccgtaccgccccacacgcagtagagatcgtggaagatcccgccactgttaccgcaggcaccgtaggagatacaaattttcgggtccggcgcggactgccacgcacgcagcgcaggggatcgcattgcacgggtgaccgcgccggtaaacagtaaaatatccgcatgacgcggactaggaacgactttaatgccgaagcgttctgcatcaaacagcgggctaagcgtggcgaaaatttcgatttcgcaaccgttgcagccgccgcagtccacgcggtaaacataggcagaacgtttgatttttttcagtaagctcgccttcatgctggcgatggattcatccaccgtcatggggaccggaatgccgttggcgtcacgggggcctaataaattgctcatcagatggcctctttcatatggcgagtcagttcaatacggtcggacggcaccaggcatttctggcgcttacattccgggcaagtctcaaagctttcgcggtggttttccgcgcggctgtcgccgttgtgcttaagcagcgcaatggcgtagtcgatctctttctggacggcgaaaggacgattgcagacgcggcagttgcacagcgcgaagcgggactgttgcaggaagtcttctttcttccacaccgccagttcgtactcttggctcagtttgatcgccgccgtcgggcagacttcttcgcagcgtccacagaagatgcagtgcccaagattaaactcccaggcaagctctcctgtggcgaggtcagtttcaaccgttaaggcgttactcgggcaggcattgacgcaggccgcgcagccgatgcactgctgcgggttctgctctggcttaccacggaagtttttatcaaccgcaatcggctccagcggataagagctggtcgccgtgccggttttgatgacttttttgataaaggtaaacatggcgattccttatttcagcgggctgtttttacgctcaatgctgtaacgctcgagttctttgtacggcaccactttgctcttcttcttacgcacatcgaccacggtcatgcggtcggtacaggagtagcaagggtcgaggctaccgataatcagcggcgcatcggaaacggtgttgccgcgcagcatgtagcgcagggtcggccagttcgcgtaggtcgcggcacggcagcgccagcggtacagcttctggttgtcgccggtcatgctccagtggatatcatcgccgcgcggcgcttcggcaaagcccagcgcaaagcggtgcggaatgtaggtaaagccttccaccatcagtgggccacccggcaggttatccagaccgtagtcgatcatgttcagcgcggtatagacttcgttgatacgcactttcagacgggaaataacgtcgcagccctgctcgctgtggacttccattggcagcaggccatagccgacaaacgggtgatcggcgcgggtatcacgggcgtgaccgctggcacggaccatcgggccgacgttactgaagtcgcgagcgatttccgggtccagacgaccaatgccgacagtgcgctgttccatgttcggagtgctcagcagcacatccaccagctcctgcacttcacgacgcatctgttgtgccagctggcgggtctggatcatgtcgtctttcagcagatcgcgacgaatcccgccgatcaagttcaggccgtaggttttacgcgcaccggtaaggatctctgccattttcatggaggtttcacgcacgcggaagaactgcataaagccggagtcgaagccggtaaagtgacaggccaggccaaggttgagcagatggctgtgcaagcgttctacctccagcagaatggcgcggatcatctgcgcacgttctggcacctgaatacccatcgcgttttccacgctcgtggtgtaggcggtgctgtgggcaaagccgcagatcccgcacacacggtcagagaggaaggtcacttcgttataacccatacgggtttccgccagtttttccatgccgcgatggacgtagaacagacggtagtcggcgtcgataatgttttcgccatcgacgaacagacggaagtggcccggttcatcagaagtgacgtgcagcggaccaatcggcacgacgttgtttttcttgtcgcccagttcgttgatgaactcgtaggtttcagcatcggtggtcggtgccggacgctgacgataatccatgctgtctttacgcagcggataaagttcatccggccagtcatccggcagcaccagacgacgttcatccggcagaccaaccggaatcaaaccgtacatatcgcgcacttcacgctcgccccacaccgccgccggaacgcgcggcgtcacggacggatattccggtttgttggcgtcaacttcgacgcgaaccgtaatccaacacttagtgcccttctccatgctcagcacgtagtaaacggcgtaatgaccattcagtttgcgttcgtcgttaccaaacagcacgctcagccagccaccctgtttgtagtaaagaaactccaccacttccggcaggtagttcacctttacggtgacagtcagctgatctttggtctgccaggcgtggtccagcacgacgcccggaaatgcctcattcagcgcggcgagataatgttgacctaatttttcttcagacatgctcaaactctctttaatcacgccgccagcaaggagacgaacgctaaaaatgcaaagccaaacccagcccaggtaatgcgcggagtaatatcaagacgcagacgggccatgctgttttcgaacagcgcgataaccaggacgccgaccaccagttttacgatggcaatcaccagcgccagcagcagtccaccggcggtgaaggtttccatttgtccccacggaataaacaccccgacgaacatctgcaacaccaccagctgtttcaggctgataccccatttcatgacgccaaagccgctgccgctgtattcagagagcgggccttcctgcagctcctgctcggcttccgccaggtcgaacggcagtttgcccatttcgataaaggtggcgaacgcacaggcacaaagcgccagtaccagcgggatgctctggctcagcggccagtgataaacggtgtcggtgatgttgctgatgttggtggaaccggcaacctgtgcggcaacccacagaccaagcagcagcatcggttcgaccagcacgccaagcatcgcttcacggctcgcgccgatagcggtaaacgggctaccggtatccagaccagaaatggcaaagaagaaacgcgcgatggcaaagagatacagtaaggtgatcaaatcacccagttgcggcagcggagaaccgacggtcaccaccggcagcgcagtagcgatagtcagcatgacgcccaccatcacatacggcgtcaggcggaacacccagccggaggcatccgggccgacgctctgacgccccagcagtttgataatgtcgcgatactcctgcaacacgcccggcccgcgacggttatgcaagcgggcgcgcgccacgcgggttataccggagagcagcggcgcaacggcaaataacaccagcgcctgaattaacggatataaaacactcattctcaggctcctcgactaacaataatcaccaccagtaccgccagttcaaccagcgccatccggcggaacagcaacgcactcccctcgcactgccagcccggcaccagagacaccggattcagccatttgcgtagtttcagcaccggcgcaaacgcctgtttcaccggcatggcaaaaccgtgagcggtaatcaccatacttttttcgtggtcgtaaccgcacacccaggccgcaccgcgggaacggcttggcaaacgatcgcctttgcaaatcgccataatgatgaatggcagcagcgggcaggcaatcagcagcaacgtgatcatcggttgagaaacggtggtgttagcaggctccagcggcagaggtacagcagcagagagcatcggcagtagccacggcgcagcaacaccgccaattacgcagcaaatcgccagtgccactacgcttacgctcatcaggagcggcgcacaggtggcgttttcggcttctttggtgcgcggcgcgccgaggaacgtgacgccatagactttcgccatacacatcaccgccagcgcaccggtaattgccagccccacagcgagcagcggccccagcagacgggcaacaaacgcgccactattgctcagtttgaaaaaactttgatagataacccattccccggcaaaaccattcagcggcggcagcgcagccattgccatcagcccgactaacatggcgatggagataaccggcattttcttgccaataccaccgagtttttcgatatcgcgatgaccggtacggaaccagacgctccccgccccgaggaacagtacgcttttgaacaggctatggttaagcagatggtacagaccaccgaccaggccaagagcaatcagcgccggttgttcgagcgcgatacccgttacgccagcgcccagccccagcaggatgatgccgatattttccagggtgtggtaagccagcaggcgctggatgttgtgctccaccagcgcatacagaccaccgacaaacgcggtgatcatgccgagcaccagcagcgcgatcccccaccacagcggtgcattaccgcccagcagactcagggttaaaatgcccagcaggccaattttcatgactaccgtagaaaacaacgcggcagctggcgcagaggcgttcgcatgtgcctgcggcacccagccgtgcagcggaataatcccggccagcaggccaaagccaatcactccgagcagccagatatcggaaccgagcggcagctgttgcatacgcatatccagcaggcgcagatccagcgtgccgtaacgctgccacagcagccagcaagcaatcgccagcagcagagtgccaagacgccccagcgcaaaccacagtttgccctctttgctgttgctggtgaggaacaccgcgcacagggccatgatttcggccattaccacgaacatgccgaggttgctggcaatgacggcgcagacggcggcagccatcaacatattgatctgcaagccgttgcacttcacctgcgcgtggcgatgccagtcaatgttgtagaggctgacaaacagaccgcacagaccgagcgtaatcagccaaatcgcgttaagcggagagatttgcacatcgtagcttaccaggctcagcgcaccgctcacgccaaccgcgccagtcagtacagtgaagcccgcggctgccgtatacagactaccaaccgcgccgccaattccagctatccagccacttaacgctttttgaaaagaaaagagaaatgccagaacagcggcggcgacaaaccacgccacgccgctattgatcagggaaattgcgctcatttagcctctccactttgagcctgctgaaacaaggtgagatcgccaaagtccgtgttaaaggtcagctcacgcttacgtttgctgacgcgggcgatatcggtgttatccaccagatgcagggctttagtcgggcacatccgcacgcaggccggaccttgttcatcaaagctacaaaggtcacatttgacggcgatcgcgcgaatacctggcacccagtcaagcaatgtgctgacacgcgccggagcaggcggtgccggtggcgctttcggggtattggcgtttgccggaatatccagcggacggctgccggaaaattcaattgcgccaaacgggcaggcgatgccgcacagcttgcagcttacgcacaggctttcattcaactgcacggccccatcgacgcgggtgatggcgttaaccgggcagaccaccgcgcagggtgcatcttcacagtggtgacagagctgcggcgcagattctttttcattcagcatcactctcaggcgcggcatactttgcaggccgtgctggcgatgcgtctcactacaggcggcctcacaagtgtggcagccgatacagagcgtggagtcagcaattacaaaacgattcaccaggcattcctcaggtgattgtcatttttgacgaaaacatgccgatgaaatgtcattttcgacactcatcgacacgcccatccccaaacaggcgtaacgcctgcaaaacgggcaaagcctcagctcatgctgccgggctttgtccctttaccagttggcttaaattcaccggcacattgttttcaatagcggtgtataagctgtcgtaaacgccagcgattttttcgagatagtgttccagaacctgttcgcgatcgcggatgttgaccttgccatcaatcatgccgtcaatgctcagttgcgcctgcgcaatccgctgtttgtcttcgccatcttttgtttcgacgtaatactcgatggtgtggctgttaaagccatccgccagggtgacgtaaatgcgaaaatgttcaaaaaggacgaaacagagttctttgtccggcgcgcagctcatggcgtgatgcaggcgcgctttgcttaacgtgatcccctgaaccaggctattgcagtagatgtgccactggtcctgtaggcgacgatgccgctgtgcgatgtaatcggctttctcgcttatttcccaaatagtcattgtcaggttacccgtttaacagagatgccagctttaagcattttttgtgccaacttttaatttattgttattaaagagatttttaagctaaagatgaatttcgtcgccgtgtcgacgtgtcatttcgacatcatcgacattattcaccgcagggataatcaacactggcacaattattgcttgtagctggcaatagttaatgggaggcgatatgcacgaaataaccctctgccaacgggcactggaattgatcgaacagcaggccgcaaaacacggcgcaaaacgcgtaactggggtctggctcaaaattggcgcattttcttgtgtcgaaaccagctctcttgccttttgttttgatctggtttgccgcggcagcgtggcggaaggttgtaaactgcacctcgaagaacaagaggccgaatgctggtgtgaaacatgccaacagtatgtgacgctactgacccagcgcgtccgccgctgtccacagtgtcatggtgacatgctgcagattgtggcagacgacggtttacagattcggcggatagaaatagaccaggagtgagcgatgtgtacaacatgcggttgcggtgaaggcaacctgtatatcgagggtgatgaacataaccctcattccgcgtttcgtagcgcgccatttgccccggcggcacgcccgaagatgaaaatcaccggcattaaagcgcctgaatttacccccagccagactgaagaaggcgacctgcattacggtcatggcgaagcgggcactcacgcaccgggcatgagccagcgtcggatgctggaagtcgaaattgacgtgctggacaaaaataaccgtctggctgaacgcaaccgcgcgcgctttgctgcccgcaagcaactggtgctcaacctggtttccagccctggttccggtaaaaccaccctgctgacggaaaccctaatgcgcctgaaagacagcgttccgtgcgcagttattgaaggcgaccagcaaaccgtgaacgatgccgcacgcattcgcgctaccggcacaccagcgattcaggtgaacaccggtaaaggctgccatcttgacgcacagatgattgccgacgccgcaccgcgtctgccactggacgataacggtattctgtttatcgaaaacgttggcaacctcgtatgcccggccagcttcgatctcggtgaaaaacacaaagtggcggtgctttccgttaccgaaggtgaagacaaaccactgaaatatccgcatatgtttgccgccgccagcctgatgctgctcaacaaagttgacctgttgccgtatctcaactttgacgttgaaaagtgcatcgcctgcgcccgcgaagtcaatccagaaattgaaatcatccttatttccgccaccagcggcgaagggatggaccagtggctgaactggctggagacacagcgatgtgcataaggtaaaactggctggagacacagcgatgtgcataggcgttcccggccagatccgcaccattgacggcaaccaggcgaaagtcgacgtctgcggcattcagcgcgatgtcgatttaacgttagtcggcagctgcgatgaaaacggtcagccgcgcgtgggccagtgggtactggtacacgttggctttgccatgagcgtaattaatgaagccgaagcacgcgacactctcgacgccttacaaaacatgtttgacgttgagccggatgtcggcgcgctgttgtatggcgaggaaaaataatgcgttttgttgatgaatatcgcgcgccggaacaggtgatgcagttaattgagcatctgcgcgaacgtgctagtcatctctcttacaccgccgaacgccctctgcggattatggaagtgtgtggcggtcatacccacgctatctttaaattcggcctcgaccagttactgccggaaaacgttgagtttatccacggtccggggtgcccggtgtgcgtactgccgatgggtagaatcgacacctgcgtggagattgccagccatccggaagtcatcttctgtacctttggcgacgccatgcgcgtgccggggaaacagggaagcctgttgcaggcaaaagcacgcggtgccgatgtgcgcatcgtttacagcccgatggatgcgttgaaactggcgcaggagaatccaacccgcaaagtggtgttcttcggcttaggttttgaaaccactatgccgaccaccgctatcactctgcaacaggcgaaagcgcgtgatgtgcagaatttttacttcttctgccagcacattacgcttatcccgacgttgcgcagtttgctggaacagccggataacggtatcgatgcgttcctcgcgccgggtcacgtcagtatggttatcggcaccgacgcctataattttatcgccagcgattttcatcgtccgctggtggttgctggattcgaaccccttgatctactacaaggcgtggtcatgctggtgcagcagaaaatagcggcccacagcaaggtagagaatcagtatcgtcgagtggtaccggatgccggtaacctgctggcgcaacaggcgattgccgatgtgttctgtgtcaacggcgacagcgaatggcgcggcttaggcgtgattgaatcttctggcgtgcacctgacgccggattatcaacgattcgatgccgaagcacatttccgcccggcaccgcagcaggtctgcgatgacccgcgcgcgcgttgtggtgaggtattaacgggcaaatgtaagccgcatcaatgcccgctgtttggtaacacctgtaatcctcaaaccgcgtttggtgcgctgatggtttcctccgaaggagcgtgcgccgcgtggtatcagtatcgtcagcaggagagtgaagcgtgaataatatccaactcgcccacggtagcggcggccaggcgatgcagcaattaatcaacagcctgtttatggaagcctttgccaacccgtggctggcagagcaggaagatcaggcacgtcttgatctggcgcagctggtagcggaaggcgaccgtctggcgttctccaccgacagttacgttattgacccgctgttcttccctggcggtaatatcggcaagctggcgatttgcggcacagccaatgacgttgcggtcagtggcgctattccgcgctatctctcctgtggctttatcctcgaagaaggattgccgatggagacactgaaagccgtagtgaccagcatggcagaaaccgcccgcgcggcaggcattgccatcgttactggcgatactaaagtggtgcagcgcggcgcggtagataaactgtttatcaacaccgctggcatgggcgcaattccggcgaatattcactggggcgcacagacgctaaccgcaggcgatgtattgctggtgagcggtacactcggcgaccacggggcgactatccttaacctgcgtgagcagctggggctggatggcgaactggtcagcgactgcgcggtgctgacgccgcttattcagacgctgcgtgacattcccggcgtgaaagcgctgcgtgatgccacccgtggtggtgtaaacgcggtggttcatgagttcgcggcagcctgcggttgtggtattgaacttagtgaagcggcactgcctgttaaacctgccgtgcgtggcgtttgcgaattgctgggactggacgccctgaactttgccaacgaaggcaaactagtaatagctgttgaacgcaacgcggcagagcaagtgctggcagcgttacattcccatccactggggaaagacgcggcgctgattggtgaagtggtggaacgtaaaggtgttcgtcttgccggtctgtatggcgtgaaacgaaccctcgatttaccacacgccgaaccgcttccgcgtatatgctaataaaattctaaatctcctatagttagtcaatgaccttttgcaccgctttgcggtgctttcctggaagaacaaaatgagttatacaccgatgagtgatctcggacaacaagggttgttcgacatcactcggacactattgcagcagcccgatctggccagcctgtgtgaggctcttagccaactggtaaagcgttctgcgctcgccgacaacgcggctattgtgttgtggcaagcgcagactcaacgtgcgtcttattacgcgagccgtgaaaaagacacccccattaaatatgaagacgaaactgttctggcacacggtccggtacgcagcattttgagccgccctgatacgctgcattgcagttacgaagaattttgtgaaacctggccgcagctggacgcaggtgggctatacccaaaatttggtcactattgcctgatgccactggcggcggaagggcatatttttggtggctgtgaatttattcgttatgacgatcgcccctggagcgaaaaagagttcaatcgtctgcaaacatttacgcagatcgtttctgtcgtcaccgaacaaatccagagccgcgtcgttaacaatgtcgactatgagttgttatgccgggaacgcgataacttccgcatcctggtcgccatcaccaacgcggtgctttcccgcctggatatggacgaactggtcagcgaagtcgccaaagaaatccattactatttcgacattgacgatatcagtatcgtcttacgcagccaccgtaaaaacaaactcaacatctactccactcactatcttgataaacagcatcccgcccacgaacagagcgaagtcgatgaagccggaaccctcaccgaacgcgtgttcaaaagtaaagagatgctgctgatcaatctccacgagcgggacgatttagccccctatgaacgcatgttgttcgacacctggggcaaccagattcaaaccttgtgcctgttaccgctgatgtctggcgacaccatgctgggcgtgctgaaactggcgcaatgcgaagagaaagtgtttaccactaccaatctgaatttactgcgccagattgccgaacgtgtggcaatcgctgtcgataacgccctcgcctatcaggaaatccatcgtctgaaagaacggctggttgatgaaaacctcgccctgaccgagcagctcaacaatgttgatagtgaatttggcgagattattggccgcagcgaagccatgtacagcgtgcttaaacaagttgaaatggtggcgcaaagtgacagtaccgtgctgatcctcggtgaaactggcacgggtaaagagctgattgcccgtgcgatccataatctcagtgggcgtaataatcgccgcatggtcaaaatgaactgcgcggcgatgcctgccggattgctggaaagcgatctgtttggtcatgagcgtggggcttttaccggtgccagcgcccagcgtatcggtcgttttgaactggcggataaaagctccctgttcctcgacgaagtgggcgatatgccactggagttacagccgaagttgctgcgtgtattgcaggaacaggagtttgaacgtctcggcagcaacaaaatcattcagacggacgtgcgtctaatcgccgcgactaaccgcgatctgaaaaaaatggtcgccgaccgtgagttccgtagcgatctctattaccgcctgaacgtattcccgattcacctgccgccactacgcgagcgtccggaagatattccgctgctggcgaaagcctttaccttcaaaattgcccgtcgtctggggcgcaatatcgacagcattcctgccgagacgctgcgcaccttgagcaacatggagtggccgggtaacgtacgcgaactggaaaacgtcattgagcgcgcggtattgctaacacgcggtaacgtgctgcagctgagtttgccagatattgttttaccggaacctgaaacgccgcctgccgcaacggttgtcgccctggagggcgaagatgaatatcagttgattgtgcgcgtgctgaaagaaaccaacggcgtggttgccgggcctaaaggcgctgcgcaacgtctggggctgaaacgcacgaccctgctgagtcggatgaagcggctgggaattgataaaagcgcattgatttaactgcaaattgccggacagatctgcctgtccggcatattattcatgaggttttttcggacgatatttttccggcagttctggcaccggacgcttgtcatcgatgagatgacgcacggttaagatcggatgacgccacagcattctcggcccggcccaacgcataatctgtttcatctcttcacgctttgcaggctggtaacagtgcaccggacactgcttacaggctggtttctcttcgccgaacacacatttatccagccgcttttgcgcgtaaacaaacaacgcctcgtaatgctccggctccgcactcgcctgcgggcatttcgcttgataaagatcgatcatttttttaatcgtcagtttttcacgagagatacgcttgccggacatgctgcctccacctcattaagatgtatttatattacatcttaatcttaaagggcactatgactccaaagaagaagggttagccaaccgatacaattttgcgtacttgcttcataagcatcacgcaaaagctgcaaaacagcatctttcccggaaccagcatcaagaactcgccgttcgcttcttcccctgaaatgattaactccggtatcatgtgcgccttatgtgattacaacgaaaataaaaaccatcacaccccatttaatatcagggaaccggacataaccccatgagtgcaatagaaaatttcgacgcccatacgcccatgatgcagcagtatctcaggctgaaagcccagcatcccgagatcctgctgttttaccggatgggtgatttttatgaactgttttatgacgacgcaaaacgcgcgagccaactgctggatattagtctgaccaaacgcggtgctagcgcgggagagccgatcccgatggcggggattccctaccatgcggtggaaaactatctcgccaaactggtgaatcagggagagtccgttgccatctgcgaacaaattggcgatccggcgaccagcaaaggtccggttgagcgcaaagttgtgcgtatcgttacgccaggcaccatcagcgatgaagccctgttgcaggagcgtcaggacaacctgctggcggctatctggcaggacagcaaaggtttcggctacgcgacgctggatatcagttccgggcgttttcgcctgagcgaaccggctgaccgcgaaacgatggcggcagaactgcaacgcactaatcctgcggaactgctgtatgcagaagattttgctgaaatgagcttaattgaaggccgtcgcggcctgcgccgtcgcccgctgtgggagtttgaaatcgacaccgcgcgccagcagttgaatctgcaatttgggacccgcgatctggtcggttttggcgtcgagaacgcgccgcgcggactttgtgctgccggttgtctgttgcagtatgcgaaagatacccaacgtacgactctgccgcatattcgttccatcaccatggaacgtgagcaggacagcatcattatggatgccgcgacgcgtcgtaatctggaaatcacccagaacctggcgggtggtgcggaaaatacgctggcttctgtgctcgactgcaccgtcacgccgatgggcagccgtatgctgaaacgctggctgcatatgccagtgcgcgatacccgcgtgttgcttgagcgccagcaaactattggcgcattgcaggatttcaccgccgggctacagccggtactgcgtcaggtcggcgacctggaacgtattctggcacgtctggctttacgaactgctcgcccacgcgatctggcccgtatgcgccacgctttccagcaactgccggagctgcgtgcgcagttagaaactgtcgatagtgcaccggtacaggcgctacgtgagaagatgggcgagtttgccgagctgcgcgatctgctggagcgagcaatcatcgacacaccgccggtgctggtacgcgacggtggtgttatcgcaagcggctataacgaagagctggatgagtggcgcgcgctggctgacggcgcgaccgattatctggagcgtctggaagtccgcgagcgtgaacgtaccggcctggacacgctgaaagttggctttaatgcggtgcacggctactacattcaaatcagccgtgggcaaagccatctggcacccatcaactacatgcgtcgccagacgctgaaaaacgccgagcgctacatcattccagagctaaaagagtacgaagataaagttctcaccagtaaaggcaaagcactggcactggaaaaacagctttatgaagagctgttcgacctgctgttgccgcatctggaagcgttgcaacagagcgcgagcgcgctggcggaactcgacgtgctggttaacctggcggaacgggcctataccctgaactacacctgcccgaccttcattgataaaccgggcattcgcattaccgaaggtcgccatccggtagttgaacaagtactgaatgagccatttatcgccaacccgctgaatctgagcccgcagcgccgcatgttgatcatcaccggtccgaacatgggcggtaaaagtacctatatgcgccagaccgcactgattgcgctgatggcctacatcggcagctatgtaccggcacaaaaagtcgagattggacctatcgatcgcatctttacccgcgtaggcgcggcagatgacctggcgtccgggcgcagtacctttatggtggagatgactgaaaccgccaatattttacataacgccaccgaatacagtctggtgttaatggatgagatcgggcgtggaacgtccacctacgatggtctgagcctggcgtgggcgtgcgaggaaaatctggcgaataagattaaggcattgacgttatttgctacccactatttcgagctgacccagttaccggagaaaatggaaggcgtcgctaacgtgcatctcgatgcactggagcacggcgacaccattgcctttatgcacagcgtgcaggatggcgcggcgagcaaaagctacggcctggcggttgcagctctggcaggcgtgccaaaagaggttattaagcgcgcacggcaaaagctgcgtgagctggaaagcattagcccgaacgccgccgctacgcaagtggatggtacgcaaatgtctttgctgagtgtaccagaagaaactagccctgcggtcgaagctctggaaaatcttgatccggatagtctcaccccgcgtcaggcgctggagtggatttatcgcttgaagagcctggtgtaataacaattcccgatagtcttttgctatcgggaatattaacgacaactgacgaataaaataaaaacaccctgtataataggaaagcttattttacagggtaaaaccatgccatctacacgctatcaaaaaatcaatgcccatcactatcgccatatatgggtcgttggtgatattcatggtgaatatcagttattacaatcccgcttacatcaactctcttttttccccaaaatcgacttacttatttctgtcggcgataatattgatcgtggaccggagagtcttgacgtcctgcgcctgctaaaccaaccctggtttacgagcgttaaaggcaaccacgaagcgatggcgcttgaggcattcgaaactggcgatggcaatatgtggcttgccagcggtggtgactggtttttcgatttaaatgatagtgagcaacaagaggcaatagatctgttgctgaaattccatcaccttccacatattattgaaatcactaacgacaacataaaatatgccatcgcacatgcagattatccggggagtgaatatctctttggtaaagaaatagcggagagcgaattactctggcctgttgatcgtgtgcagaaaagccttaatggcgagttacaacaaataaacggcgctgattattttatatttggacatatgatgtttgataacattcagacgttcgctaaccagatttatattgataccggaagcccgaacagcgggcggctgagtttttataaaataaagtaatctcatgcttcttctgtgaagcatgagtaacccggtgttattgcaggccattattcatttttcgctaccagcaaagagagatcctgcttcaccagcgcgcgactggcactctccggcaaaccgtcgtctgtaataatctgatcaaactcgcttaatggtaacgccagccatgtcgccacctgaccatatttcgtcgcatcacagaccaaaactcgctggcggctggcactggcaatcgcccgtttcaccgtgactttatcttccgctggcgtagaaatcccccgcacactccaactgcttgcagaaataaaagcctgatcaatcatcaggctgcgcagcatggtcgcagcggcttccccgacacaggaacggttttcccgacacactgcaccgccagtgtgaataattgtgcaattactgttgtcgagcaagtagtccgcaataacgaaatcgtttgtgaccacagtcagactctccatgtgaatcagatgctgtgctatcgctaacgtggtcgttcccgcatccagatagatacaacttcccggctgaacaagacttgccgccagcttgccaatagccgctttttgcgtcattgccagcgcagtttttacctgatgagaaggttcatgcgccacgcgtcccggagactggacgcctccggacaccagcacaacggctccctgctgctccagtttttgtaaatcccgacgaatggtcatatgactcacattcattctgtccgttagttcagcaatactgacaatgcctttttcagctaccatctcaaggatgatttggcgacgctctacgggtatcaacttttgctccttcctttgtcctgcactcattctacgctatttgcctgcgaaacgtgcgcggcgcaactaacgcttagttcacataaaataacacacaatgttaatttatgtgaatcagatcaccataccgttatcttccagcgcttatattcacaatatcaaacaaaatatcacttaaattaacaaggagagcagatgaaaacgggatctgagtttcatgtcggtatcgttggcttagggagtatgggaatgggagcagcactgagttatgtccgcgcaggtctttctacctggggcgcagacctgaacagcaatgcctgcgctacgttgaaagaggcaggtgcttgcggggtttctgataacgccgcgacgtttgccgaaaaactggacgcactgctggtgctggtggtcaatgcggcccaggttaaacaggtgctgtttggtgaaacaggcgttgcacaacatctgaaacccggtacggcagtaatggtttcttccactatcgctagtgctgatgcgcaagaaattgctaccgctctggctggattcgatctggaaatgctggatgcgccagtttctggtggtgcagtaaaagccgctaacggtgaaatgactgtcatggcctccggtagcgatattgcctttgaacgactggcacccgtgctggaagccgttgccggaaaagtttatcgcataggtgcagaaccgggactaggtagcaccgtaaaaattattcaccagttgttagcgggcgtacatattgctgccggagccgaagcgatggcacttgcagcccgtgcggggatcccgctggatgtgatgtatgacgtcgtgaccaatgccgccggaaattcctggatgttcgaaaaccggatgcgtcatgtggtggatggcgattacaccccgcatagtgccgtcgatatttttgttaaggatcttggtctggttgccgatacagccaaagccctgcacttcccgctgccattggccagtacagcattgaatatgttcaccagcgccagtaacgcgggttacgggaaagaagacgatagcgcagttatcaagattttctctggcatcactctaccgggagcgaaaagttgagctaaactctaccgggagcgaaatcatgatcaagattggcgttatcgccgatgattttaccggcgcgacggatatcgccagttttctggtggaaaacggtctaccaacggtacaaattaacggtgttccaacaggtaaaatgccggaagcaatcgacgcactggtgatcagcctgaaaacgcgctcctgtccagtggttgaagccacacagcaaagcctggcggctctgagctggttgcaacagcaaggttgcaaacagatctatttcaaatactgctctactttcgacagtacggcgaaaggtaatattggcccggttaccgatgccttaatggatgctctcgacacgccgtttacggtcttctctccggccctgccggtcaacggacgtacggtttatcaggggtatttgttcgtaatgaatcaactgctggccgaatccgggatgcgccatcacccggtaaatcccatgaccgacagctatcttccccgtctggttgaagcgcaatccacagggcgctgcggcgtcgttagcgcacatgttttcgaacaaggtgtggatgccgttcgtcaagagctggctcgcttacagcaagagggctaccgctacgcggtgcttgatgcgctgaccgaacaccatctggaaattcagggagaagccttgcgcgatgccccactggtaacgggcggttctggtctggcgattggcctggcccggcagtgggcgcaagaaaacggtaaccaggctcgcaaagcagggcgtccgctcgctgggcgcggcgtagtgctctccggtagttgctctcaaatgaccaaccgccaggtagcacattaccgtcaaattgcaccagcccgtgaagttgatgtggcacgctgcctcagtattgaaactctggccgcttatgcacacgaactggcagagtgggttctgggccaggaaagtgtacttgctccactggtttttgccaccgccagcactgacgcattggcagcaattcaacagcaatacggtgcacaaaaagccagtcaggcagtagaaacactgttttctcaactagcggcgcggttagcagcggaaggcgtgacacgctttattgtcgcaggcggtgagacctccggcgtagtcacacagagcctgggaataaaagggtttcatattggcccaaccatttccccggcgtgccgtgggtaaacgcactggataagcctgtctcactcgcccttaaatctggcaacttcggtgatgacgcctttttttcacgagcccaaagagagtttttatcatgagcgatttcgcaaaagtagagcagtctttgcgagaggagatgacgcggattgccagtagtttctttcagcgcggctatgcaaccggtagcgctggcaatctgagcctgcttttacctgacgggaatttactggcgacaccgacaggtagttgcctgggcaatctcgatccgcagcggctttccaaagtcgccgcggatggcgaatggttaagtggtgacaaacccagcaaagaggtgctctttcatctggcgctgtatcgcaacaatccgcgctgtaaagcggtggtgcatttgcacagcacatggagcacggcgctttcctgcctgcaagggctggacagcagcaacgttattcgtccgttcacaccatacgtggtgatgcggatgggaaatgtcccgctggtgccttattaccgaccgggcgataaacgcatcgcacaggatctggcggaactggcagcagacaatcaggcttttttactggcaaatcatggcccagtggtttgcggtgaaagcctgcaagaagccgccaacaatatggaagagctggaggaaacggcaaagctgatttttattctcggtgaccgcccgatccgttatctgaccgcaggtgaaattgcggaattaaggagttaatgcaatgcctcgttttgcagctaatttatccatgatgttcaccgaagtgccttttattgaacgcttcgccgcagcgcgaaaagccgggttcgatgctgtggaatttctgtttccctataactactccaccctgcaaatccaaaagcaactggagcaaaaccatctgacactggcgctgttcaataccgctcccggagatattaatgcgggggaatggggattatccgcccttcccggacgtgagcacgaagcacacgcagacatcgacctggcactggaatatgcattggcgctcaattgtgaacaagtccatgtgatggcaggcgtcgtgcccgctggcgaagatgctgaacggtaccgggcagtatttatcgataatatccgctacgctgccgaccgctttgcgccacacggcaagcgaatattagttgaagcactcagccccggcgttaagcctcattatctcttctccagccagtatcaggcactggctattgttgaagaggttgcgcgagataacgtgtttattcaactagatacttttcatgcgcaaaaagtagatggcaacctgacgcatttaatccgcgactacgccgggaaatatgcgcacgtacaaattgccggactacctgatcgacatgaaccggacgatggagaaatcaactatccgtggctgttccgcctgttcgatgaggtgggatatcagggctggatcggttgtgaatataaacctcgtggcctcaccgaagaagggcttggctggtttgacgcctggcgctaattcgttaaatccctaattacaacgtacccatacatccccccatctacggatggggtaggttaactataactttcagacagggtttcccatgtccacaattacattgttatgcattgcgttagctggcgtaatcatgctgttgctgctggtcatcaaggcaaaggtacaaccattcgttgctttgctcctcgtcagcctgttagtcgcacttgcggcaggtataccggcgggcgaagtgggtaaagtgatgatcgccgggatgggcggtgtgcttggttccgtcactattattattggtctgggcgctatgctggggcgtatgatcgaacactctggtggtgcagagagtctggctaattatttcagtcgcaagttaggtgacaaacgaactatcgctgcgctgactctggcagcgttcttcctcggtattcccgtcttctttgatgtcggctttattattcttgcgccaatcatttacggttttgccaaggttgccaaaataagcccactcaaatttggcctgcctgtcgctgggatcatgctcactgttcacgtggcggtaccgccgcatccaggccctgtcgccgcagcggggttactccacgcagacatcggctggctaaccatcatcggtattgcgatttctattcccgtaggggttgttggctactttgcagcgaaaataatcaataagcgccaatatgcgatgagtgtagaagtactggaacagatgcaactggctccggccagtgaggaaggcgcgacaaaattaagcgataaaataaatccaccgggcgtcgcgctggtcaccagcctaattgttattcctatcgcgattatcatggcgggtacggtttccgcaacactgatgccgcctagccatcccctgcttggtacgctacagctgatcggcagtccaatggtagctctaatgattgcgctggtgctggcattctggttattggctttacgtcgcggctggagcttacaacacaccagcgacattatgggcagtgcgcttcctactgcggcggtagtgattttggttactggtgctggaggggtatttggcaaagtgctggtggaaagcggcgtcggcaaagcccttgccaacatgctacaaatgattgacctgcctctgttaccagccgcatttattattagtctggcgctgcgtgcaagccaggggagtgcaaccgtagcaatactgacaaccggcgggttactcagtgaagcggtgatgggattgaatccgattcagtgcgtattggtgacgctggcagcctgctttggtgggcttggtgcgagtcatattaatgacagtgggttctggattgtgaccaaatatctggggttgagcgtagcagacggtctgaaaacctggacagtgttaacgaccattctcggttttaccggactcttaattacctggtgcgtatgggcggtaatttgaccttaataaaaaggtccgatgggcatcggaccttttattgtgcacagaaaaggccagcctcgcttgagactggcctttctgacagatgcttacttactcgcggaacagcgcttcgatattcagcccctgcgtttgcaggatttcgcgcaaacggcgcaggccttcaacctgaatctggcgaacacgttcacgggtgaggccaatttcacgacctacatcttccagtgttgccgcttcgtaccccagcaaaccgaatcgacgtgccagcacttcacgctgtttggcgttcagctcgaacagccatttgacgatgctctgcttcatatcgtcatcttgcgtggtatcttccggaccgttctctttttcatcggccaggatgtccagcaacgctttttcggaatcaccacccagcggggtgtctacgctggtaatgcgctcgttaagacgaagcatacggctgacgtcatcaactggcttatccagttgctctgcgatctcttccgcacttgattcatggtccagcttatgggacaactcacgtgcggttcgcaggtaaacgttcagctcctttacgatgtgaatcggcaaacgaatagtacgggtttggttcataatcgcccgttcaatcgtctggcgaatccaccaggttgcgtatgtactgaagcggaaaccacgttccgggtcaaacttctctaccgcgcggatcagccccaggttgccctcttcgataaggtccagcaacgccagaccacgattgccataacggcgggcaatttttaccaccagacgcaagttactctcgatcatccggcggcgagaggcgacatctccacgcagtgcgcgacgcgcaaaataaacttcttcttcggccgttaacagtggactataaccaatctcaccaaggtaaagctgagtcgcgtccaacacacgctgtgtggctccctggcttaacagttcctcttcggccaaatcgttatcactgggttcctgttctactaaggccttttcgtcaaaaacctcaactccgttctcatcaaattccgcatcttcatttaaatcatgaactttcagcgtattctgactcataaggtggctcctacccgtgatcccttgacggaacattcaagcaaaagcctggttccgccgatttatcgctgcggcaaataacgcagcgggtttacggatttccccttgtaacgaatttcaaaatgcaagcgtgtactactggttccggtgctacccatggtcgctattttttgccccgccttaacttcttgttgttcccggaccagcattgtgtcgttatgggcgtaggcactcaggtaatcatcattatgtttgatgataatcagattaccgtagccgcgcagcgcgttaccagcataaacaacgcggccatctgcggtcgcgataattgcctgtcctttgctgcctgcgatatcaatccccttgttgcccccctcagaagcgccaaaggtttcgatcactttgccctcagtcggccagcgccaggtggagataggcgtactggtacttgtactgctgacagtcggctcggttgtgcttgctgttggtaccgttacaggcgctgtgaccgtggtcgcagttggcttgttgttcggcaacattttgttagcactctgttcaccgctagactcagaatacgtaattgtcggttggctcgcaacagcaacggtggaattttgtgcaggcttgatcacaactccttgctctgctgcgtcggcctgggtaatggcatttccgccagtgattggcgtaccggaagcattacccacctgcaaggtctgaccaacgttcagcgcgtatggtgcctgaatattgttgcgctgagcaaggtcacggaaatcgttgccagtaatccaggcgatatagaaaagtgtgtcgccttttttcacggtataggtactgccgctataactgcctttcggaatgttcccatactgacggttatagacgatgcgtccgttttccatctgtaccggctgctgagctactggctgcactggctggatttgcggttgttgagtagcctgaatttgtggctgctgcaccggctgaatttgcggttgctgcgctgtagacgtcgtccccattttcggcggcggcgtaatcaacataccagaattagtatttgcaggcgcattgccattaacggagctgaccggtgccggtggattactagtgtcagaacagcctgccagccataggctaaccagactcaaagccgcaatgcggcgaacggtgaattttgggcttcccgcgctcatttatcccccaggaaaaattggttaataaccagtgacataattaccgtgcaaggcaccctactgaacactggaaaagatgttcacgatacgctgacctgcggcaaaataaccaggaaaaatccaggtatttcctcacgttttaagccagctcacccttcactaaagggacaaagcgcacggcctccacggtatcgataataaattcgcctccccgacgacgcacccgtttcaaatactggtgctcctcccctacgggtaagacgagaatcccgccttcgtccagctgcgtcattagcgcagttggaatttccggcggtgccgccgtaacaatgatagcgtcaaacggcgcacgtgcctgccaaccttgccatccatcgccatgacgggtactaacattatgtaaatcaagatttttcaggcggcgacgtgcctgccactgcaagcctttaatccgttcaacgctgcaaacatgctggacaagatgcgccaggattgccgtttgatatccgctaccggtgccaatttccagcacccggctctgcggcgtcagctcgagtaattcggtcattcgcgccaccatatatggctggctaattgtctgcccctgacctatcggcaaagcgatattgtcccaggctttttgttcaaacgcttcatcaacgaatttttcacgcggcacggcggcaagtgcattcagcacctgctcatcctgaataccttgcgcacgtaattgatccagaagtgcttgtacgcgtctgcttaccattgcgtgccaactcccacgctgtttaaccagtcactaaccacatcttgcgcgctatgcgcagttaaatccacatgcagcggcgtgatggagacatagccctcatctaccgcagcaaaatcggtccccggaccagcatcacatttaccgcccggcgggccaatccagtacagcgtattgccgcgcggatcttgctgcgggatcacctgatctgccggatgtcgtgtaccgcagcgcgtcacgcgaatacctttgatttgatccaagggtaaatccggaacgttaatattaagaatacgcccggtgcgcagcggctctttacacagtgcgcgcaaaatactacaggttaccgccgcggcagtgtcgtaatgtttatgcccgtcaaggctgacggcaagcgccggaaaacctaaatgacggccttccatcgcggcggctaccgtaccggaataaataacatcatcccccagattcggcccggcgttaattccggacacaacaatgtccgggcgcggacgcatcagagcattcacgccaagatagacgcaatcggtcggggttcccatttgcacagcaatatcaccattttcaaaggtaaacgtgcgcagggaggattccagtgtcagagaattactagcgccgctgcggttacgatcgggggcgaccacctgaacgtcagcaaactcacgcaaggctttcgccagcgtttgtataccgggtgcatgtaccccgtcatcattactcagcaatatgcgcataatcacctgttgtgttgataagttccctgacaacgctggttgcaaaactacccgccggaagccagaaacggatctctacggtgacgtcatcccaccaattccagcttaattgttgcggatacagcagcatcgctctgcgcgcggcttcaactttttcgcgcaccagtaaagcttgtaattcagtttctgcggcgacagctgcttgttcgaatgccagcgcttcacgctgagttccccattcgccactgcctggcaatgcggcggttatcatcaactctttatcgttgacgcgacgctgtaattccgccagttcttcggtggttgcgacaaaccagctaccacgtccggctaattgtagcgcatcgccgtcaacaacttgattaacgtctgcttttttgaggcgctcagcaacaatctgattaaacaacgcactgcgggctgcgctcaaccaaaaactccgtttattgcgatcgcgcaccggagtattggtttgcgcccagcgctgcgccccctgcaagttgctaccgccaatcccaaaacgttgggcaccgaagtagttcggtacaccttttacgcaaatatcgatcagacgttgttcaacgtcatcgcgattgctcacttcgcgcagaaccagggtaaaggcgttacctttcagcgcgcctaaacgcagcttgcgcttgtgccgcgcatactccagcacctggcagccttccagttgaaaggcgctcagatcgggcatttccttgcccggcacgcgagcgcataaccactgttccgtaacagcatgtttgtctttttgcccagcgaagctgacttcacgggcatgaattttcaggaatttcgccagtgcatccgccacaaaacgggtattgcagccgtttttgaggattctaaccagaatatgctcaccttcaccatcaggctcaaagcccaaatcttccaccaccacaaagtcttccggattggctttcagcagcccggtgccttgcggtttaccgtggaggtaagtgagattatcaaactcaatcattttgttgccttaatgagtagcgccaccgcttcacaggcaatcccttccccacgtccggtaaatcccagtttttccgtagtagtggctttcacgttaacatcatccatatggcagccgagatcttcggcaataaacacgcgcatttgtggaatgtgcggcaacatcttcggtgcctgagcgatgatagtgacatcgacgttgccaagggtataacccttcgcctgaatacgacgccaggcttcgcgtagcagctcgcggctatcggcacctttaaatgccggatcggtatccgggaacagcttgccgatatcccccagcgccgccgcgccaagcaatgcatcggtcaacgcatggagcgccacgtcgccatcagaatgcgccagcaatcctttttcgtaaggaatgcgtacgccaccaatgataattgggccttcaccgccaaaggcatgtacgtcaaaaccgtgtccaattcgcattatgtattctcctgatggatggttcgggtgaggtaaaactcggccagtgccaaatcttccgggcgcgtgactttaatgttatccgcacggccttcgaccaactgaggatggaatccgcaatattccagcgcgctggcttcgtcggtaatagtcgcgccttcatttagagcgcgcgtcagacagtcatgtaacagctcacgagggaaaaattgcggcgtcagcgcgtgccataagccgttgcgatcaacggtatgagcaatggcatttttgcccggttcggcacgtttcatagtatcgcgcactggtgcggcgaggatcccccccgtgcggctggtttcgctcaacgccaacaatcgcgcgaggtcatcctgatgcaaacaaggacgagcggcgtcatgcaccaatacccactgcgcgtcgccagcggctttcagacctgccagcacggaatcggcacgctcatcaccgccatctacaacggtgatttgcggatgattcgccagaggaagttgtgcaaaacggctatcgccaggacttatggcaatgacgacacgtttcacccggggatgcgccagcagcgcatgcacgctgtgttcaagaatggtttgattaccgatactgagatattgcttaggacattccgtttgcattcgacggccaaatccggccgccggaaccacggcgcaaacatccaaatgagtggttgccatgttaattcccgggctgatttatcgattgttttgccccgcagactgtgcgcgcttgctcgcgtcaggcaccagacgataaaaagtttcgcccggcctggtcatgctgagttcattacgcgcacgctcttcgagcgcctcctggccgccattgagatcgtcaatttcggcaaaaagttgatcgtttcgcgctttaagtttcgcgtttgtagcttgctgtgccgccacatcatcattgacgcgggtatagtcatgtataccgttcttaccgaaccacaggctatactgtagccagaccagaatagccagcaacagcagcgttagtttacccatcctgccccctgaaaaacggcatcatcatcccatgcatccgaagacgactctacatcctctgttggggataccgcgacaacgcgggcaaatgtaccacatttgtccattgttacgtatacccagggcgtgcagaacataatctcattattagttacggtttgaattatgaacagaggagacgggaaagtacaaattagcccagtagccacataaacagtgcgccaaacataatgcctactgtcaccagggtgaaaacaatactgtagcgtagctttccgtccatcaaactatgcagcgcaatccccaccactaccgcgacgggcatcagcgccagaaagaaaggccaggtgtagataaagaagaacagcgtgttagagccataaatcaacatcggcatcgccagcgcaaataaccaggagataaaaccgaccacggcaccaggcagactccatgtggtttcttcatcctcagtaaggctgtcgttatttgttagtgtaatgttatggctattacgcatatttgatcctgttactttgacgaaccgggcatggaaacccggtggtgtctcaggatctgataatatcgttctgtctcaacagatctaataattgctgtaccaaatttgttactaattgttcaccattgagatgaatttctgcgctttcaggcgcttcgtaaacggaatctattcccgtaaagttgcgcagttcaccggcacgcgctttcttatataagcctttgggatcgcgggcttcgcaaatcgccagcggcgtatcgacaaacacttcgataaagcgcccttctcctacgcgttcgcgaaccatctggcgttcggcgcggtgtgggctgataaatgcggtcagcaccaccagtccggcttcaaccatcaaattcgccacttcaccgacgcgacggatattctctttacgatcggcatcgctaaaaccgagatcgctgcataatccgtggcgaacattgtcgccatccagcagatacgtactgacgccgagtttatgtaacgcctcctccagcgccccggcgaccgtacttttaccggacccggagaggccggtaaaccacagcactacaccacgatgaccgtggtgtagctcgcgttgttgcacagtgaccggatggctatgccagacgacgttttcgtcatgcagcgccattatttatcccccagcaaatcgcgcgcgccccagtgcggaaagtggcgacgaaccagagcattcaattccagttcgaatgcactgaattcagatggcgcagcagttgcctggctaactggctcgtgcaccataccggcacccacggtcacattgctcaggcgatcgataaaaatcagcccacccgtcaccggattttgttgataacgatctaacaccagcggctcgtcaaaagtgagatccacgaggccgatcccattcagtggcaggttttcaacttcacgctgggtaaggttattaatatcaacctgatagcgaatgccatcaacacgcgcgcgcgtcttcttaccggcaattttgatgtcgtaactctgccctggagaaagcggctgttccgccatccataccacatccacgctcgcgctctgcaccgccggtaacgcttcgtctgccgccagcagcagatcgccacggctgatgtcgatctcatccgtcagcaccagggtgatcgcttctccggcaaaggcttcttcgcgatcaccatcaaaagtcacgatccgcgcgacgttactttccacaccagagggcagcactttgacacgttgcccgacttccacgcgaccggatgccagcgttccggcgtaaccacgaaaatcgagattcgggcgattaacgtactgcaccgggaagcgcattggctgagcatccaccactcgctggatctccacggtttccagcacttcgagcagtgtcggaccgctgtaccacggcatactttcactttggcttgccacgttgtcgccttccagtgcagagagcggcacaaagcggatatccagattacccggcagctgcccggcaaaggtcaaataatcttcacgaatacgggtgaacgtctcttcactgtaatccaccagatccattttgttgatcgccacgaccagatgtttgatccccaacagtgtggagataaaactgtgacgacgggtttgatcgagcacgcctttacgggcatcgatcagtaagatcgccagttcacatgtgcttgcgccagtcgccatattgcgggtgtactgctcgtgccctggggtgtcggcgataataaatttacgcttctcggtagagaaatagcggtaggccacgtcaatggtgatgccctgttcgcgctcagcttgcaggccgtccaccagcagagccagatccagcttttcgccctgggtgccgtgacgcttactgtcgttatgcaggctactgagctgatcttcgtagatttggcgggtatcgtgcagcagacgaccaatcagagtacttttgccgtcatcgacgctaccacaggtcagaaaacgcagcaggcttttatgttgttgcgcaatcatccaggcttcgacgccgccttcattggcgatttgttgtgcaagtgcggtgttcatcttaaaaatacccctgacgttttttcagctccatagaccccgcctggtcgcggtcaatcacgcggccctgacgttcactggtggtggaaaccagcatctcttcgatgatttccggcagtgtttgtgcattactctccaccgcaccggtcagcggccagcagcccagcgtacggaaacgcaccatccgttttttaatcacttcgcccggttgcaggtcgatacggttgtcatcaatcatcatcaacataccgtcgcgttccagaaccggacgttccgcagcgagatatagcggaacaatgtcgatattttccagccagatgtattgccagatatcctgctcggtccagttagagagcgggaagacgcggatgctttcgcctttgttaatttgcccgttgtagttgtgccacagctccgggcgctgatttttcggatcccagcgatggaagcggtcacggaaagagtaaattcgctctttagcgcgggatttctcttcgtcacggcgcgcaccaccgaaggcggcatcaaaaccgtatttgttcagcgcctgtttcaggccttcagttttcataatatcggtatgtttcgcgctgccgtgcacgaatggattaatccccatcgccacgccttccgggtttttatgcaccagcagttcgcagccgtaggctttagcagtacgatcgcggaactcatacatctcgcggaatttccagccggtatcgacatgcagcaacgggaaaggcagcgtacctggataaaacgccttgcgcgccagatgcagcatgacgctggaatctttaccgatagagtagagcatcaccggattactgaattctgccgccacctcgcgaataatgtggatgctttccgcctccagttgccgcaggtgagtaagtcgtatttgatccataaccgttcctttgcaataccgctattttcttgccatcagatgtttcgactatagggagcgtaagagaacgaatgaaattaccaattagaatgagtagttccttaacggaataacgatttggcaaagctaatatcaaaaagtgcttaaggcaccggatttcgggcgtttaggaagatttgaaattgttttagcgcagcggcagtttcatactatggcggtaaaaaaatttgcatggtatttaaggactcactatgttttccgcattgcgccaccgtaccgctgccctggcgctcggcgtatgctttattctccccgtacacgccagcagtcctaaacctggcgattttgctaatactcaggcacgacatattgctactttctttccgggacgcatgaccggaactcctgcagaaatgttatctgccgattatattcgccaacagtttcagcaaatgggttatcgcagtgatattcggacatttaatagtcggtatatttataccgcccgcgataatcgtaagagctggcataacgtgacgggaagtacggtgattgccgctcatgaaggcaaagcgccgcagcagatcatcattatggcgcatctggatacttacgccccgctgagcgatgctgacgccgatgccaatctcggcgggctgacgttacaaggaatggatgataacgccgcaggtttaggtgtcatgctggaattggcagaacgcctgaaaaatacgcctaccgagtatggtattcgatttgtggcgaccagcggcgaagaggaagggaaattaggcgctgagaatttactcaagcggatgagtgacaccgaaaagaaaaatacgctgctggtgattaatctcgataacttaattgttggcgataaattgtatttcaacagcggtgtaaaaacccctgaggcagtaaggaaattaacgcgcgacagggcgctggcaattgcgcgcagtcacggaatagccgcaacgaccaatccgggtttgaataaaaattatccgaaaggcactgggtgttgtaatgacgcagaaatattcgacaaagcgggcattgctgtacttagcgtggaagcgactaactggaatcttgggaataaggatggttatcagcaacgcgcaaaaacacctgccttcccggcgggaaatagctggcatgacgtaagactggataatcaccaacatattgataaggctcttcctggaagaatagaacgtcgctgccgtgacgttatgcggataatgctacctctggtgaaggagttggcgaaggcgtcttgatgggtttgaaaatgggagctgggagttctaccgcagaggcgggggaactccaagtgatatccatcatcgcatccagtgcgcccggtttatccccgctgatgcggggaacaccagcgtcaggcgtgaaatctcaccgtcgttgccggtttatccctgctggcgcggggaactctcggttcaggcgttgcaaacctggctaccgggcggtttatccccgctaacgcggggaactcgtagtccatcattccacctatgtctgaactcccggtttatccccgctggcgcggggaactcccgggggataatgtttacggtcatgcgccccccggtttatccccgctggcgcggggaactctgcgtgagcgtatcgccgcgcgtctgcgaaagcggtttatccccgctggcgcggggaactctctaaaagtatacatttgttcttaaagcattttttcccataaaaacaacccaccaaccttaatgtaacatttccttattattaaagatcagctaattctttgttttcaaacaggtaaaaaagacaccaaccttaaaccatccaaatctaccggggtacgcctgtttaacccaaatgtctggaactcaaatcccgtttccgtattcgttgcccatgccatcactacattgccttcttccgccagtccagctatttgttcccagatcatttcacgaatttttgcggatacatcacctacatatacccctgcacgtacctccaacaaccagatggctaatctgcctcgtaagcgcggaggtacattttcagtgaccacgaccaacatactcatttcagctactccgatggcctgcatctcccagactaacaggaagcggaatggcaacaggctgtgcatcttcaggtggggccggcggttgtatttctccagcggcaagcacgtcctctataagcggaatcaatttggctaatgttttactactgcgaaaaatatccctgcacgccaaacggacttcccggtccggctcaccagggttacgacgcgctatctcaaaagctttcggtacaacagtgtcaaatttaatgatgtctgcaatatcgtaaacaaaggaaagaggctttcctgtatgcacaaacccaatagctggtgcataaccagctgcaagtatcgccgcttcagttacgccgtataaacaggaagttgcagcgctaatgcattggttgatcgtatcgcccttttcccagtctttcggatcgtagcgacgtccattccatgtcacgccgtattgcttcgccagaagtgcgtaggttgcccgcacgcgactgccttctatacctctgagttgctctacggagcgccgggcaggcgcaggttctccaaaccgaagttcaaacattttacgtacgaccttcagacgcaaatcttcatccagagcaagttttgcctgatagagcagcttatcactacgcgcacctccaggctgaccagaagcataaacacgaacgcccgcttcccccacccataccaacaatgttccaacttgcgcagccaggcgtacagctgcatggctaacccgtgtaccaggttccagcatgatgcaggcaacgctgccaacaggaatatgagtgcggatccctgtcttgtcgataagtacaaacgcgccatctattacatcgatctgcccatattgcagaaagatcatggagacgcgatctttgagtggaatgggattaaggggaagccaggtcattttattacacctcaatcacagtggagccaaagatagcaagccacatcccatgcttttagctggcccaataccttgctgtacaagatctattaacgctggcgcgtcgttgatggtgagcacaccttcaaagcaaaccgtttggatctttccacttttaccatcaccagaaaaatactgtggccgttcgcttatgggatgcacatcttcaacgcgcgccgcattgcccaatttacgttgcaaccacgcgatttgttctgcttcttttattaacggaacccgacagcgtttaatattccctttactgtccaggcgcttttgattgtcgagaatagttttgatcggatttgcccgaagccgaaaatagagtggaacaccaacctgaagttgaaattcaacctgtttagttttaatgactgtcgcaacggcagtactaacaggcatttgcgcactctgcaataaaacatgacagccttctggtgtgtttcgcttctcaacatgaaaaagaaaatcacgagcagcatccggtctgtttggaaataaatgccataatccctggtgaagttggtaaagatccctgctccaggccctggcaatgatgactttactgagatacatccatacctcctttaatcacataccattctcgggaagcaaattgtcgaggcaaggtgatcatcggttcgtcgcgcgccgtaaattttaaatgatgccctgtaacactttcctcactatatatatcgccgccaacgggctcataatttaatagcgccttctgaggatcgcttgcctgacatgtccccaaaaaaagcgggtgtgttagtgggcaacttctccgccccaggtaaggtgtataccgaggctttaatactgctttttcaagttcactgataaccatcgttgcatggggtgttaaccagagagcgacggtaaaggaggcatcacataaatattcgcgccatgtttgaatcgtttcatgacttttcaaaccacggtaatcttctcgcgctccaaggactgtatggtaatcacgcaaccccgttacagacacacgacgatcgtcaagaatgagttcatcgcagcgcactgcaaattgcacactctcacttaacgcctgtaaactagaagtatcatcacgttggatcccaagacaagccccgagtagccctaataacccgcttcgggtcggaaatcttccggtaggtcgcgttccttcaaaggtcggctgcccccaggcttgcattggcccagcaagccgcaagatcaaataagatctcatgttcacgcctcgccattattacgaacccaggattttaactgttctaaagtaggcatttgtttaacttgagcagtaattgggtctacatcagataagctgaattgcgcagcagctccgttcagaccatatccattggcaacgcgatcccaatattgattaaacgcctgtatagacggttgcaaaaagccatctttcgctttaaccgctttttcaaaagcatttgccatagaaagtggcatatcggagaaattaaccattaccatatccgcagggttaaaagcggcataagtacgctgttttgctccagggacctctgttgccagcatatgaacaacatgggttgcaatttccagagcctgctccctggaggcaccacctaaattttcctgaagttgagcgaggttaatgttggcataacgataaaaaacaccgctactaaattcctgagttcccagatgtgcagaaccttgttcctgtaaatcatctacagcggtgaaccagtcaatatcagaatcaacctgatgagtagtgatcgcatgcgcaatggacattgcaccatcaacttttcccaactcagtcatcatgccgctggttgccattcttccactaagcgcaatatcaacaccctgctgtaaattcacacgtatggcggcaatatcttccttaagaactttgagcagctttttatcatccagattatcagcctctgcttttgcaacctgctcacagaaccaggctatttctcccacaacccagggagtaaccgcatcggcagaaatcttttcggcttcatcaacacttttaccggagagcagcgctaatgtcttatcgatgattttttggtcaaaacgttcaccaagtttttgccgaagaacatcacgtaattgtgcaagatgaatggttctgagactggattcaccaatattttgtgcgtaataaccacttttacgcatcgcacgtttaaggctttgactactaattcttactcgtcttttgccgccgaaaatagcgtctttctgcatgttcatatcgtcgcggttcagacaactagggctgtgagagatcagaacatgaatattgataaagttagacatagaaaggtttccttacgcatttttgtttgtggtcaatacaaaatcttccagaagttgctggcgttcgcgctttccccaccaggtcaacatcctggccattaatggccagtcaagtacgggttcggcgtgagtaagtaatcgacgtaactggaccatatcggctgttctgtcagcccgaattaattgaaagatacggcgctcgttaattcttccactattggctaaagctcttcccaagctgatacctgttgtttgctcgctttttttgtcctgatgtcggatgacattctttcctgcgctcaggcaaaacaccatgcgcaaaagagcctgctggtgacgtgggttttcccaaccaaaaggttgcaccagcctataaaacgcagggatatcgcgtaattcatcaggttcactaacacgtctaatttgcgcacaacttccattatccagttgttgccaggctcgatataaagccattgcatcaatttcatcagccattacttggccctccttgcggttttaactcccgtaaatgtttgtatagcgtggcgcgggcaagcgctaatgtgcttattaatttaggatgatgtgcatagggagctacagattgattaaatagcatttcacacaattgatgaagtttgtctcgtaaatcagctattacctcatcagcctgggaaaaattaacattcgccagtacatcgggaattaataattcactctgtcgatagaaatgcctttctgcagtctcatgaacagagactccggcccctttgaagtctttatttttaaacccttctgcaaaggtatataacgccttgcgtaaggctgttttatatcccaaaccaacagtcactatttcgtttatcacattgccgtattgttgccacccctgattaaacatcaacacatcatgacgccgttcaagaatagatgcttgattattacgatatccccccataatcaattcaagaggactttgcggcgcaatatttctgaattgattcacaaccgccgccacgcgatttccattttcattttgaataatcttatctaccacaactcggctgatttgtgtccaacttggtgcggaggtggtgaaagcaagaaatttttcctcaacctcccctttcttgactgttaccagacaaggggaatgcggatggggccatagcccattaactgtaaaggtaaatttttccttaagaaaaccggtataacgcaaattgctttcctgtccacagcaagaacatttaccaatcccaatgggatcgcataattcaatatgcgctggttgccagaatagaccacggacaaacccaatactgctagcaggtatagactcattggacttgataggtttaatccaggtaggttggttttccgtatgactttcattaggaaattgtttttgaagacgaggtaatgtgaggacattgagtaacaccgtactacgaagatcgatcccacgtacgaacgttgttacaggtgttcctccacgtaaaccgcttttaaaaccaccaccaaaacctggtgcctgattcgcctggttgaataacgcaatcgcagtgcatccaccacataatgcttcaccctgccccggttgattgacaaatgcacaattcgtcgcgccgcttaccccagccaacagtttttccattggagtcacatcatttgctttgacacctttggtctgcataaagggatgttctgcgtgattaaggtagaacatatctatccacggcgcgatgagttgttgaaactcatcttcagtgagcggattcattatgcgatgtcgaaattcaacgtcatcttttgccggggcgataatttgcccaatgcaaaccagcagtgctaaagcggccagttccatatcgtcacggggcaaacttaatcgccactgatctctactgcagtataggctttgcagatttatgatttggactttccccccgtttcgcgggcgtacagggatccagttatcaataagcaaattcatttgttctccttcatatgctccgacatttctcctgcatttctatacgtcggcacacttccgttatcggtaaaaacaaagaaaaaatacggcgtaattaattcaataatcacattcactgcaaaaatatattcattggtttaatacaattaacctatacatatattaagatgtgttgaattgtttaaagacaataatgcatgcatttcaaatctgcaagttattcgttttattattaaagaaacttttagttataataattaccatgaattttattacataaaatattcatactgtgaatataaaatctcataccgggaaattaaaagaagatgtacattgtgcaccttccctacttaagtagggataaaccgttattggtcttattatcgtcattgataacaatcattcccgaagttatttgggatttgcagggatgactctggtcatcccttcatcccctgtataggtaataacaatactgttaccctgccagacccatccatccagattctgtttcccttccagccaaagtaacccatcttcatctactacttcagaaaaactacgtttccaggtgaagggtacattgacgcgattaagtgcaagcgcctcatactgctgttcatgacttaggtcctcgtagacctggccatcgagcagttgtttaccactagacgtttgtacataaggcaataatggcaggctcatttccccatccctcgttaccgcaagaatggtttcatcgttatcctgcaagctatattcttcagcccactgcaggaccttgcgagccttgaaccttttttcacactcggcgctttcaaatttatccatgccattgccgacccattctggctcatccatttccgcatcatcgtaaatgctatccagccattgccggtaagcatcagggaaaaataaggatgctccattaagcccctcaatatgttgctgcgtccgccacatgactctaacgttgctataaatatgctcatgtcgtccgtaaccctcgccatcaggcagcaaaatggtggcaacaggaatctcaaaaccagcgggacgatatttgcgatgatggcgatgtaaacggcccaatcgttggaaaagcaaatctgcaggacaatgctgagtaattaaccaatcaaaatcaacgtcgagactttgttccacgacctgggttgcgacaagtatccgtccaacatttcgcttcccatttttgccgaaattgctaataactcgattctctttttcacgacgatcgttcagcgtaaagcgcgcatgaaacaaatctatatctacttgcgtgttatttagctcctttagccgttggtagcatacttgtgcaacgtcaaccaaattgcaaataagacagacctgtgcacccgcgtttgccgctgcgatcattcgctctaacatcgtaaggtcaggtaacatgtcagctaaacaaataggttctggctgaatgctaaagcggggcgggagttgttctggatgagctagcagatcaaaacgttgcgcaccattcacacctcgccagttaatgagtggatatgcggagttattttccactggatctgtatgcagaccataagtatccagaagtttctgtttttgtttcattggtagggttgcggaaagaagaataacactccctcccacatcagcctgagccttgagcactgcctccagcaagccgttcatataggtgtcgtaagcatgaacttcatcaacaattaaaacacttcgaccaattcccaaaccacggataaagcggtgtttaactggcaatacgcttatcaacacctgatcaatcgtgcaaacgccgatttgcccaagaaacactttcttattgctttgactcaaccactgacaacactgaacccacgcttcttcttgcccctgttcagtaatcgcgcgactttttatactttgaaagaggtggttaaaccgactattgccatgagcaagaataagatttggggaactaaataagtggctcgcgctcgcttccattctcgtaagcatagcattcgcggtagcttgtgttgggagggcaaaaataacactatccgcaatttgttgatcaataagtttccaagcataggccagcgctgtttccgttttaccggagcctgtaggtgcctctattaccgtcagcccgggagctactggaagagcatcaactaacacctgtaattgtctgggttgatagccattgtccagtagtgcatgaacaccttcataacatcgcttattacttacaagtccactcaactccaatacccggctcgcatcctgctgtcggtcctggaaatacgttctcagagcatttatgtcggaaggcgcatcctcattaaacagaaaggtattcgttgtagtccaggagcctaaccagtcagcaaggctgcaaaaacctgctaacagactactacaatcaggtggtatatcgtttatagataaccccgctggcgttaaaaataatgcttccagtacagatatccactcctcacgagcctgtttatcttgcgcagcataagatgccagagaagctggcatttcccaacggctcttatcttgatcctgggaatgtaatataaaaccatgatgtcctgtaacggcctctacccatggaaaccaggactcataaggatgaggagcggcatcaaaaaaactgaaaaaatccccgagagattgctcactaagactatcctggttaaaccaatacagaccggctgcaccatgattaaatttacggcacatttgtgtacttggaccattaagacttggcgttgcaggatttaatttcagccaactttctgcacttttatattggaatcgtatatcaaactttccaatatcatgaagagcaatgaaaaataacagccaggccttcaccctctgtttacttagcatttcatttcggcaaaaagtattttgcagtacgacactttgatcccaccagcaatctgcaacagcagcaacatcaaggcaatgataaattaacagatgaatatcatttcctttcgtcaagcttttactggattttccccagtaatggcatatatatttaaaaggttccattaatagcctccctgtttttttagtattatcgatgatatcagcgggctatttttcgatgctgctcataaatatcgaattacagtgatatacacatgtcttgcctccctgcaaagaagagactaacattcgaattgtttgggttcgaacgctggcctcaggttgatagaaatatcgcctggggcttttgtccatctggaacctcgcgaatgcttaacgccagacagcctcaagcacccgacgccattctatacctgataattcttcccgcggcgttcacgtttaaaatcaggaatgctgctcgcaaaataaaaacgcccccatcatttctgacagaggcgtttaatttgtccggcaatatttacccttcgtgtaacccacattccctttttaagccaaagaaacgcgtttcttcttccgccatgccgggttcccatttacgggttgtatgggtatcgcccacgcttaaatatccttcatcccataatgggtgatatttcaggccatgtttttgcaggtactgataaatagttcggttatcccagtcgataatcggcagcactttaaatacgccacgctgaattgccagcaccggtaaattggcacgactgccggattgttcacggcgcaggccagcaaaccaggtttgcgcattcagttctttcagagcccggttcatcggttcgactttgttgatgtcattgtacttttcaatgccttcaacgccctgctcccacagttttccgtagcgtgcttcctgccaggctgcgctttcggtagcacggtacactttcaggttgagcttgagtttgtccgttaactcgtcaataaagcggtaggtttccgggaacaagtaacccgtatcggtgaggatcaccggaatatccgggcgaatttgattcaccagatgcaggctcaccgccgcctgaatgccaaagctggaagaaagtacatattcaccgggcagattatccagcgcccaggctacgcggccttcagcgtccagtttttccagttcggcgttagtttccgccagcgccagaatgcgatctaccttcggcagttcgttcagggcgtttagatcgagtttggacatagattcctcactgtttgccttgcctgatgcgacgctcacgcgttcttatcaggcctacaagaccgggctgatggttaatcccacaaatcacgcgccggatcgagcaccgggcgaatgatgcccgcacgcaccgtaaagtcgccgaagccttcacccgcttcgcgctctttcgcccagcgccctatcagttcatcaaggctcgccaggatttccggctcggtgatgttttctttatacatccgtgggatacgtgtcccaatgcggttgccgccaagatgcaggttgtagcgacccggcgctttacccaccaggcccacttccgccagcatcgcgcgaccacaaccgttcgggcagcctgttacacgcatcacgatatgctcatcgctgacaccatgtttcgccattaaattatcgatgttgtcgataaaagacggcaggaaacgctctgcttccgccatcgccagcgggcaagtcgggaaactcacgcaagccatgctgttttcacgctgcggcgtgacggcattcattaacccgctctctttggcgatcttctcgatcttcgctttctcgctttccggtacaccggcgatgatcagattctggttcgccgtaatgcggaaatcgcctttgtggatcttcgcgatctccagcaggccggttttcagcggacgcgccggataatcaaggatgcgaccattttcgataaacagcgtcaggtgccagttatcatcaatgcccttaacccagccaatacgatcgcctcgtccggtgaactcatatggacggatcggttcaaatttgatccccgcgcgacgctccacttccgctttaaacgtctcaacccccacgcgctccagcgtgtatttggttttggcatttttacgatcggttcggttaccccagtcacgctgagttgtcacgacggcttcggccaccgccagcgtatgctccagcggcagatagccaaactcactcgcggtgcgggcgtaggttttcttgttgccgtgttcgatggaaagcccaccgcccaccaacaggttaaagcccaccagcttgccgttttcggcgatcgccacgaagttcatgtcgttggcgtgcagatcgatatcgttctgtggcgggatcactaccgtggttttgaatttacgcggcaggtaggtctggccgaggatcggttcttcatcagtagtggcgactttttcctggtcgagccagatctccgcatacgcgcgggtacgaggcaacagatgctcagaaatcttcttcgcccactcgtacgcttccgcgtgcagctggctctcgtaagggttgctggtgcagagtacgttacggttcatgtcgttagctgtcgccagcgcatcaagaccgacgctgtgcagcatctggtgcaccggtttgacgttctttttcagaatgccgtggaactgaaacgtctggcggttggtcaggcgaatgctgccatagatggtgttttcaccggcaaatttgtcgatcgcctgccactgtttagtggtaatcaccccacccggcagacgacagcgaagcagcatcgcgtggcgcggctccagcttctgttcagcacgttcggcgcggatgtcgcggtcatcctgctgatacatgccgtggaagcgaatcagcaggaagttgtcgcccttaaagccgccggtcagaccgtcgtttaaatcttccgcaatggtgccgcgcaggtagttgctttcatgcttcatgcgctcggcgtctgtcagttttccttcgaccactaaaggccctggatgtttttcgctcattagtagacatctcgctgataacggcgctctacgcgcagctcacttaaaaattcatccgccgcttcggtgtccatgccaccaaattcggcaatcacttccagaagtgcctgctcaacgtctttcgccatgcgattagcgtcgccgcagacataaatgtgggcaccatcattgatccagcgccacagctccgcgccctgttcgcgcagtttgtcttgtacgtaaactttttctttttgatcgcggctccaggcaagatcgatacgtgtcagcacgccatctttgacgtagcgctgccactccacctggtacaggaagtcttccgtaaagtgcggattaccaaagaacagccagtttttacctggcgcttcgtcggcggcgcgttgctgcataaaggcgcggaacggcgcaataccggtgcctgggccaatcataatcaccggggtttctggattggctggcaggcggaagttatcgttatgttcgataaatacgcggacttcgccctcttcttccacgcggtcagcgaggaagctggaggcaccaccggcacgggcgcggccttccacgtcgtaacgcaccacaccaacggtgacgtgtacttcgttctcgacttccgcctggctggaggcgatggaatacagacgcggcgtcagcgggcgcagcagattaattagcgcttcggcatcaagctgtgccggggagaaacgcaccatgtcaacaatcggcgtcgtcgcggcgtaatgctgtaacttcgctttatcgcccaccagcggcagcagtgtttcactgcgggtaagcgtggcgtaattctcaacaatgttggcggtgttgacggtcagttcgaagtgccactgtagcgcttcgttcagaggcaacgttttgccctcgacggtgacaggttcatcgcctttcagccacagcagttcgacaagttctttcaccagtgccggatcgttctgataccagacgcccagcgcgtcacccggctggtaacgcatgccgctgtcacctaagtcaatttcgatatggcgaacgtctttttcagagttacgcccggtaattttctggttaacagagaggctagccaccagcggcgcgtctttgctgtacgggctggtgtggatttcatttaccgcgccagtagcgacggattggctaggtgccgcgacaggcgcacggcttttaagcgcatcaaccacgcgggcgcgccactcgctggcagcagcctggtattcaacatcggcatcgacacggtcgagcaggcgttcaccacccagttccgccagcttgctgtcgaaatctttcccggactggcagaaaaattcataagagctatcgccgaggctaaacacggcaaacgcggtgttttccagctttggcgcttttttggagaacaggaacttatgcagcgcgacggcttcttccggcggttccccttccccttgcgtactcgtcactacgatgagcagtttttcgctggcgatttgtttgaatttatagtcgcccgcgttcaccagcttaacgttcagttttgctgctaataaatcatcacgtaatgcttcagcaacccggcgcgcattgccggtttggctggcggagataatagttatacccggcatttctgcggctggcgctggcgtcgctgcaagcgcagcaggctgctgattgagtacgccccagaaatagccagaaacccaggcaagctgggtgggagttaaatcggtcgtggccgcctgaaggcgtgccagttgctccgggttcaacggaagcaacgcggaaggtgggacctgtgtcgtcatgcgtcgttatgttccagtaagcaaagctgtttctgcgccctgtcagcgcccataaaacagaagagaaggtaaggttaacggggcaaacggtgtggattaaagacgggatagcgataactaataaccaaatcgactaacctgttttagcaatagtctttaacaacaaaatagattaaccaacctaatgaaaaacaaatgaatttagccaatcattaagataaatcagcgattttgcgcaacaaagtcgttttagataatgcgaaaaaacagcctttccggtactctacggcggttttatcgtcctgtagagaaattatgatgtccaccacgttatttaaagatttcaccttcgaagccgctcaccgcttaccacacgtcccggaagggcataaatgtggtcgcctgcacgggcattcctttatggtgcgactggaaattaccggggaagtcgatccgcatacgggctggattatcgatttcgctgaactaaaagcggcgtttaaaccaacctacgagcgcctcgatcaccattatctcaatgatattccaggtctggaaaacccaaccagcgaggttttagcaaaatggatttgggatcaggttaaacccgttgtgccgctgttaagtgcggtgatggtaaaagaaacctgcaccgcaggttgtatctatcgcggcgaatgataagagtgtgtcggcggtcaatttcccttaagtaacgctatgttagggtgttgtgttctggatatctggggcatgacatggaagacgactgcgacattattattattggtgccggtattgcaggcaccgcttgcgcgttacgctgcgcgcgagcgggtttatccgttttgttactggaacgcgctgaaatccccggcagcaaaaatctttccggcgggcggttatatacccatgcactcgcggaactcctcccgcaatttcatctgaccgcgcctcttgaacgacgcatcactcacgaaagcctttccctgttaacgcccgatggcgtaacgacgttttccagcttacagcccggcggtgaatcctggagtgtattacgtgcacgattcgatccgtggctggttgccgaagccgaaaaagaaggtgtcgaatgcatccccggagcgacggtggatgcactgtatgaagaaaacggcagagtctgtggcgttatttgtggtgacgatattctccgcgcccgttatgtggtgctggcagaaggtgccaacagcgtcctggctgaacgtcacgggttagtgactcgtcctgctggcgaagcgatggcgttggggatcaaagaagtgctgagcctggaaacatccgctattgaagaacgttttcatctggagaataacgaaggcgcagcgttgctgttcagcggcaggatctgtgatgacttacccggcggcgcatttctttatactaatcaacaaacgctcagcttagggattgtttgcccgctctcttcccttacgcaaagtcgtgttccggcaagcgagctgctgactcgctttaaagcgcatccggcagtgcgcccgcttatcaaaaacacggaaagtctggagtatggtgcgcatctggtgccagaaggtggcttgcacagtatgccggtgcaatacgccggtaacggctggctgctggtgggcgatgcgttgcgcagttgcgtcaataccggaatttccgtgcgcggcatggatatggcgctgactggcgcgcaggcggcggcacaaacgctgataagcgcctgccagcaccgcgagccgcaaaatctgtttccgctttatcatcacaacgtagagcgcagcctgctgtgggatgttctacagcgttatcagcatgttccggcgcttttgcaacgcccgggatggtaccgtacgtggcctgcgttaatgcaggatatttcccgcgatttatgggatcagggtgataaacctgttccaccgctgcgccagttattctggcatcatttacgtcgtcacggcctgtggcatctggcgggcgatgttatcaggagtctgcgatgtctgtaacgtaagatgttatcaggagtctgcgatgtctgtagcccgtaatctctggcgcgttgctgatgcgccgcacattgttccggctgactccgttgagcgccagacggcagaacggttgattaacgcctgtccggcaggtctttttagcctcacaccggaaggtaacttacgtattgactatcgcagttgcctggagtgtggcacctgccgtttgctgtgcgacgaaagtacactacaacagtggcgctatccgccttccggattcggcatcacctaccgctttggataaataataaggataatttatgcccctcttacacctgctccgccagaatccggtgattgctgccgttaaagataatgccagcctgcaactggcaatcgattctgaatgccaatttatttccgtgttgtacggcaatatctgcaccatcagtaatatcgttaaaaagattaagaacgccgggaaatatgcttttattcatgttgatttgctggaaggcgcgagtaataaagaagtcgttattcagtttttgaaactggtgaccgaggcggacggcattatcagtaccaaagccagtatgttgaaagcggcaagagcggaaggttttttctgtattcatcgcctgtttattgttgatagtattagctttcacaacattgataagcaagttgcgcaaagcaatccggattgtattgagatcctgccaggctgtatgcccaaagtgctgggctgggtgacagagaaaatccgccaaccgctgattgccggtgggctggtgtgcgatgaagaagatgcgcgtaatgcgattaacgcgggtgtcgtggcgctttccaccacgaataccggggtctggacgttagcgaaaaaattactttgacgggataatcgtaaccaattgaatttggtttgatttgtaggccgcacgccacatccgacattcagcgcctgatgcgacgcttgacgcgtcttatcaggcctacaagtccccaggccagaaccgtaggcaggatcatccggcaacacgttattggcaatctgcgtgaatgtttgtcaccagtgcctccagcaccactttccagtcatcaaccacgccaacatctgcctgactaaataccgcagcgctggcgtcatgattaatcgccaccacaaacttgctattgcgtacgcccgccattaacgctgctgcgccagaagcgccaacaacaatacacacctcaggtgccagcagatgtccggaaataccaatcactttttcagcatcaacgccaccgttcatcactcgcgcccgactgtagcccacttcggctcccagcttttctgccagcatagcgatttcctggttatctgcctctccgccctgccccaccaccagcacccgtctggcctcagctaatgggtcgcgggtaacatttttcagatcctctgtgctaaccagccagtccggaagcgcacccgggacaatgttcagttgttgcattccagagggcaacgtggcgtttttcgctgctcccgcctgacgcgccagggaaaggcatagcgggcgtttttctgtttgcagcgtcgccgttagcgcatttccccagtgggatttgcgcacgcttacggttggaatatctaagctagtcacctggcagatgcttgcaccatgtaaacgccaggccagccgggtgctcagttcatcgccaaacgttcccggcggaaagagaacaacgtccgcaggcgttcgctgccactgttccaccaacgcatccagcacctgttccgccactacaggctgaggttcaatctgccagtgcgccagggtacaaccgctgaaatcctgcgccgccagccagcttgctattgcggcattctcctgatttattgtcacaattgcgatattcatggctgcatcctttggcgtaaatagtcctgccatagcttttgagctttttctgctaccgtttgcccatcaatcagcgtcgctccgcgtcgttgctctgctcttgccagttgcagacactgcatcgctggcatttcggcagcaacagttttacggataatttctgctttccccgcagccattcgctggcgcattcccggtactggcaaggccacttcaccgcactgacgcacggcaatcaccgcaggcaagcgaacccggcaacaacgcaacccatgttcagtacgctgttcgagggtgataaacagcgcgtcgagagtgaaacgctccacctgggtgaagcagggccagcccagcatttccgccagcaaaaatggcgtttgcccattctgcccttcgctgctttggcagccggtaattatcagatccagcggattctgatgctgccattcggcaatatggcgagcgacaaattccggcgcaaagcgcagatctgccgccgtctccagcaatacagcttcctcaaacccaagagccatgagatagcgcagccagtgcaatgcccgttcatcccccatgctcaacgcggttaaagacatcggcgtaccgttttttctctgcgccaacagcagcgcggcagcggcctgttcatcagcaccgagtaaacttcgcagtaggctaatatccggtccgcttttaccctgagccgccgcctgccactctttttccgccagcattccggcatccggttcggctttaaacgctaacagaatgttcattcgcacctcctacatttcccgccgccaccagcgggagggctttagtttctggtgcccatagccaggtcacaacaaaaccaaccaacaacactgtcgccaggagcaataaggtgacttgcattccccactgcgccagcacccacggcagcaggccagtacttaccgccgcgccaagtcgactcatggcagtggcaaaaccgacgcccaggctgcgaatgtcagtaggaaaactttccgcaggcaaaatgcccaccagattactgactgcgctaatggtggtgctgaagagaacaaaaagcagcagcgttaaactactgccggaaggcaaacaggccatgactaccagcgttgccgccagcagcaaaaaacttcccagcaaaaatttgcgatgtgccagcaggtgcgtcagaactaatcccagcagcgcgcccacaattaacaacgcattaagcatcaggctggcagtcagcgcatcttccagaccaatagtctgggcgatagttggcagccaggtataaatcacaaaccatgggattacgaggcagacaaagaagacgctgttaaacgccgtgcgccgccagtaacggctagagaacaaggttttgatgtgtttatgggtcgccgttaccacttcatcgcccagtaaaacatggggaccaaaatagcgatgcacgatagcgtgagcttctgcaaaacgcccctggcgcagtagccagcgtggactttctggcgttccccagcgtaataacgtaatcaacaacgcgggcagagctgcgcttgccagtagccagcgccaggcctccgggttttcggaaataaagtgatgtccggcaatacttgccagcacatagcctacggtccacaccacgctgaatgcgcccagcaaaataccgcgatggcggcgcggggaaaattcagccagcaaggtgtgacctacactataatcgcctcccagaccaatgccaatcaaaatgcgcagtccaataagatgctctggcgtggtggcaaaaaattgtaaaaagctagcaagcgtaatcagcaaaaagctgaaggtgaagattttttgccgaccaatatggtcggagatccacccaagaaccaggctgccaaggaacaaaccaaggagcgcgctgccgccgatcattcccgccataaacggcgtcagttgcatggcgggcgtaagctgaataatggcgtaaccaatgacgccgagaacataaccgtcggtcaggtgtgcgccgaaagtgagcgcagcaatgcggcagtgaaaacggttaagcggtaaatcatccattcgcaccggactagtgttcatctttaccccttcattgtccggtaataagaacggcttctcgcctgagaagccgaaaaggcaacgccccgtcatcgcggaacgctgcctgacacattatttttcaatcggatagatagtacccgtattcataatgccattaggatcgaactgctttttcagcccttccagcaacgcccacgcgctgccgtgttccagtttgctccagtgaacgcgatgtttaccgataccgtggtggtgcaccatgctaccgccgaggcgaatggtttcttcacagatgatcttgttgagcggattgtggtacttgtcgatttcctcttccggcttacagtcaacgacgttgtaatcgtagacgaagtacatgttggtgccgttctgatagctatgagaggaatgaccgcccagcatggtgatgtcgtcggcgtgcgggaactcagtacgaatacggttaataacgctttcgtagatttcgtggatgcagctccagcagccggatacttcggtggtaaagcccatgttgccggttttgaggatctgcacacgttcggcagccactttatccggtccccagttcaggttgttaaaccaggtttcgatcagcttgctgtccacgcgctggcattgcgggtagcgggcaacgatttccgcaatcccttcgcccgtcaccttcgcaatgcgagggttaccttcagccataaagatcagcacgcattttccgtcggcaaaatgggtgaagtgttgggtgccatcttcagcgtcatacaaacgagcgatactcggacgatacccttccaccatgatttcacgcaggatgttgaagccggttttcatgtcttccaggatatagccgtagaagaggttgttttccggggtgaatttaaagattttcactgttacttcagtgatatagcacaatgcaccttcgttgccgatgatgatgtgacgaatgtccgggccagccgcgcggcgtggcacgtttttaatgcgtgtgacggtgccatcagccaatactgcttccagaccaacgaccatatcttcgattgcgccgtagagtgtggagaactgcccgatacttcgggttgctaccaggccgcccatctgcgccagcggcttactctgcggagaatgccccgtggtgtaacctttttcacgcaacgcgttttccagcacttccagcggaacaccacattgcgccgtcgcctgcatattctcaatatcaatattaatgatttgattcatggcggagccgtcgagcaccacgctgttttctacaacagtttccagcccaccttcggtggcggaagcaccggtacgcggcacaccgttaattttgtgcgcattcataaaattcagcacacgggatacttgctctgtggaaccgagttttacgaccgctgccggaatcggcaaagtataaatgccatgaatatccggaaatttacgaaaacggtcaatactgtttttctttaatactgtttcatcggtaattacgcgatctgcaccaacaatttcctttagctggtcgacaatcgctgcgcgagataaagacatagtaattccttcctgataataaaaatggaataatcattaataagagaaaacagaaaccaccgttatgggttagcgcactaaataaccgccatcaaccactaataaatgcccgttgacataattgcttgccggacttgcgaggaatacggctgcgcccattaaatcctgagtatcgccccaacggtttgccggaatatgatcaagaacgcgctgattggtttctggattactgcgtgtcgccagcgtaatatctgttgcataatagccaggggcgataccatttacctgaatattatattgacctagttcatcacaataagctttggtgaacccggcaagagcatgtttagtggcagaatatgcaggactccattgtccacctaagtaagagaacaaactacagatattaataattttgccgcttttctgcgggatcataatttttgcagcttcatagcttaactcgaatgcggcggtcaggttcacatcaatcatcggatcccagtcggcacgaccgaagtccagcaccttattcagcttacaaataccggcattgttaaccagaatatcaactgtaccgaaacgctcacagcaagcagcgataatcttctgcggcgcgccttctgcggtgatacccacctgcatgaagtccacctcaacaccctgtttttcaatcatttcctttgtttcgccgttatctttgacgaaactaggaataaagatatttgcgccagctttggccaacgccatggcaaatgcctggcctaaaccgctattcccaccggtaacaattgcggttttacctttcagggagaaaaaatccatactgaacgcattgagagattcgatactcatagttagctccaatttccgtaaggcaaaaaaaaagaaaggtaacttcccccgcgagagggaagttacctttctcattatctctggtaactggagataatttttagcataagggcataactgctaatgtgatcgtaatcacagtgtgatattcgtattgtcaaataattttaaaaagcagaagcgtgattactctcacacaacacctctgctttccatgttatttattatttcaattactagagacctgagaaaagtaatccacctgaaagggcggcttacttttctcttttttttgtctattacaaatgggaatacgatatgcaacacaacagttatcgccgttggataaccctcgcgataattagttttagcggcggcgttagtttcgacctggcttatttacgttatatttatcaaattcccatggcgaaatttatgggattcagcaataccgagataggtttaataatgagtacctttggtattgcggccattattctttatgcccccagcggcgttattgccgataaatttagtcaccgcaaaatgattacttccgcgatgatcattaccggattactgggtctgttaatggcaacgtatccaccgctgtgggtaatgctctgtattcagatcgcctttgcgataacgacgattttaatgctgtggagcgtgagcattaaagctgcaagcttgcttggcgatcatagcgagcaagggaaaattatgggctggatggaagggctgcgcggcgtcggtgtaatgagcctggcggtgtttaccatgtgggtcttttctcgctttgcaccggatgacagcaccagcctgaaaacggtcattatcatctatagtgtggtttacatcttgttggggattctgtgctggttttttgttagcgataacaacaacctgcgcagtgccaataacgaagaaaaacagagtttccagcttagcgacatcctggccgttttgcgtatcagcaccacctggtattgcagcatggtgatttttggcgtcttcaccatctacgccattctgagttactccaccaactatctgaccgaaatgtatggcatgagcctggtggcggcgagctacatggggattgtgatcaacaaaatattccgcgcgctgtgcggcccacttggcggcataatcaccacctacagcaaagtgaaatcccctacccgcgtgatccaaatcctttccgtactcggcctgctgacgttaactgccctgctcgtcacgaactctaacccgcaaagcgtcgcgatggggattggcctgattttactgctgggattcacctgttacgccagtcgcgggctgtactgggcctgccctggcgaagcgagaacaccgtcttacattatgggcaccacggtaggtatttgtagcgtgattggattcctgccggatgtcttcgtttacccaattatcggccactggcaagacaccctgcccgctgcagaagcctaccgcaatatgtggctgatgggcatggcggcgcttggcatggtgattgtctttacctttttgctgttccaaaaaattcgtactgctgatagcgcccccgcaatggctagcagcaagtaagccaggaaaattacaggagaaaaatcatgagcaaaaaatacatcatagggattgatggcggaagtcagagcacaaaagtggtgatgtacgatctggaaggtaacgtggtttgcgaaggcaaaggcttattacagccgatgcacacgccagatgccgatactgcagaacatcctgacgacgatttatgggcaagtttatgttttgccggtcacgatttgatgagtcagtttgccgggaataaagaagatattgtcggtattggtctgggatccatccgttgctgccgtgcgttattgaaagccgatggcacgcctgctgcgccgttgattagctggcaggatgcacgcgttacacgcccttacgaacacactaaccctgacgtggcatatgtcacctcttttagcggttatctgacgcatcgcttaaccggcgagtttaaagacaatatcgccaactattttggtcagtggccggtggattataagagctgggcatggagcgaagatgctgcggtaatggataagtttaatatcccccgtcatatgctgtttgatgtgcaaatgcctggcaccgtcctcggacatatcacaccacaagccgcactggcgacacatttcccggcaggactgccggttgtttgtaccaccagtgataaaccggtagaagctctgggggccggattactggatgatgaaacggcggtaatttctcttggcacttacatcgcattgatgatgaacggcaaagcactgccgaaagatccagtagcgtactggccgattatgtcttctattccgcaaacattgctgtatgaaggttacggtattcgcaaaggcatgtggacggtgagctggctgcgcgacatgctaggcgagagcttaattcaggatgccagggcgcaggatcttagtccggaagatttactcaacaaaaaagcttcttgtgtgccgccaggctgtaatggtctgatgacggtgctggactggctgaccaatccgtgggaaccgtacaaacgcgggattatgatcggctttgattccagcatggattacgcatggatatatcgtagcatactggaaagcgtggcgctgacgctgaagaacaattacgacaatatgtgtaatgaaatgaatcactttgcgaagcatgtgatcattactggcggcggtagcaacagcgatctgtttatgcagatttttgccgacgtgttcaaccttccggcacgacgtaacgccattaacggttgtgcaagcctgggggcagcgattaatacagcggtaggtctggggctatacccggattacgcaacggctgtcgataacatggttcgcgtgaaagatatctttataccgattgagagcaatgccaaacgctacgacgcgatgaataaaggcattttcaaagacctaaccaaacatactgatgtgatcctgaaaaaaagctatgaagtgatgcatggggaattggggaatgtggatagcatccagagctggagcaatgcgtaagtgaggaaggccgggcgggaaactgcccggcctgaacatacctgaatggttatccccgctgacgcggggaacataagttcgacaacttaaaaaatgataacaagtccggtttatccccgctgatgcagggaacataataaaaactttaactagttcggtttatccctgtttttacaaggaatattaactacactcgatgtctttagaataaaagacaatacgaatcgcactttatcaattttcacttaaagtatgaactggatatctttattcataagaactattcatcaacagcgtatagaggcggttatgtaaaaccactcattagcctcaaaacaaagacaaacttccagatttattacttaaccaatgaataacaagcttaaaaaatatactgttattctaaagaaaaaattaacaggcattaattcaatattaaaaaaataatagattaaaatttcttaacgatttaagaatcatacaaataacactttgattaaatttaattttttgtatcgataattgtgaacctctctggcatggagaactattttgaacatgaggtgttacgtggatatgttgcttattacaagtactgctaatataaaaacttgagaaagagataacgggttatatggtggtttatccccgctggcgcggggaactcgacagaacggcctcagtagtctcgtcaggctccggtttatccccgctggcgcggggaacacctgttttcgcaaatctatggactattgctattcggtttatccccgctggcgcggggaacacgggcgcacggaatacaaagccgtgtatctgctcggtttatccccgctggcgcggggaacactggctctgcaacagcagcacccatgaccacgtcggtttatccccgctggcgcggggaacacgaaatgctggtgagcgttaatgccgcaaacacaggtttatccccgctggcgcggggaacacattacgcctttttgcgattgcccggtttttgccggtttatccccgctggcgcggggaacactctaaacataacctattattaattaatgattttttaagccagtcacaatctaccaactttatagtatcacacaaacaacacatccattatgttaaagagcacttaatccattgattaaaaaggtaaatatttaaaataactctatacaaactaaaatctaccaaactttaccgcaataattttcactccagcgaaaaattaatgccacagaatttgtagagaatgctaatgattagccctggatgggtaaaatggaggagttttcagaggcgacaaacaatataaatgagtagaagtctttacaggttccacccatttataacgcttataaatgtttaatcaggcaatatttagatatttatgtgtttgcatgctcaaacgccaattacgcgcaatgcaggtttcaatgcacaaacgtgtggcatcatccttttggctaatcggctgcagtgcaatgactcgcggtttatcatcggtcagcgttgccagtagttcatccagtgcttcaatatcgcgtacgcgccccactggatgcttgatttcgttggctcgctccagtgcctgactcaacacttcatagccgccgcgcatgttcagctttgggcttacggtaacccaggtattcggtgtgcagcgtacctcatgagtaccactggtttcgatctggcagctaaaaccgttcttttcgagcagatcagtcagtggcagcaaatcatgaatgcaaggctcaccacccgtaatcaccacatgccgcgcggtgtatccctggcgaccaatgacagccagcaaatcttcactgctcgcagccccccacttatcactctctttggtcttcgccagaatgctgaaaagggagacttcccgatcctcaagcttttcccaggtgtgtttggtgtcgcaccaggcacagccaaccgggcatccctgtaaacgaataaaaatggcgggaacgccggtaaagtaaccctcaccttgcagggtctggaacatctcgttaatcgggtactgcatagcattctctgtgaagtggataattgttaattattgcagatcctgccacaacaatcatgtcttattaacattctgttacaggcaggtttaaagaaaaatgcgaaacatatcgttaataattaaagggagtaacgtattatgtcagaagaaaataaagaaaatggatttaatcatgtcaaaacattcaccaaaattatatttattttttctgtattagtttttaatgataacgaatataaaattaccgatgccgccgtcaatttatttatccagatttaatgagaaatttataatgcgctatttcatactaatgttcactttcgtatgttcctttgttgcagcccaaccaactattgtcccacaattacagcaacaagttacggatcttacgagtagcttaaacagtcaagaaaagaaagaactgacgcacaagttagaatctattttcaataatacccaagtgcaaattgccgtattaattgttcccacaaccaaagacgagacaattgaacaatatgctacaagagtttttgacaattggcgtttaggagatgccaaacgtaatgatgggatactgatcgttgttgcctggagcgatcgcactgtccgcatccaggtaggttatgggctggaagaaaaggtaaccgatgctctggctggagatatcatccgtagcaacatgatacccgcatttaaacaacaaaaattagctaagggattagagctagctataaacgctttgaataaccaactcactagtcaacaccaatatccgactaatcctagtgaaagtgaaagtgcgtcttccagtgatcattattactttgctattttttgggtatttgcagtgatgttcttccctttctggttttttcatcaaggcagtaatttttgtcgcgcatgtaaaagtggagtctgtattagtgcaatctatcttttagatttattcctgttctccgataaaattttttccattgctgtattttccttcttttttactttcaccatatttatggtctttacctgtttatgtgtacttcagaaaagagcatctggtagaagttatcatagtgacaacagcggttccgctggaggcagtgatagcggcggatttagcggcgggggcggttcttctggaggtggcggcgcatccggccgctggtaactcaaccataaaaaatgccagcccggaggctggcatttttaaatcagataaagtcagtcttatgcctggcctttgatctctttacgaccgttgtacggtgctttttcgcccagagcttcttcgatacgaatcagctggttgtatttagcaacacggtcagaacggctcatagaaccagttttgatctggcctgcagcagtaccaacagccaggtcagcgatggtagcgtcttcagtttcgccagaacggtgagagataactgcagtgtagccagcatctttcgccatcttgattgcagccagagtttcggtcagagaaccgatctggttgaatttgatcaggatggagttagcgatacctttttcgataccttctttcaggatcttggtgttggttacgaacaggtcgtcaccaaccagctggattttgtcgcccagaactttggtctggtatgcgaaaccgtcccagtcagattcgtccagaccgtcttcgatagaaacgatcgggtactgtttggtcagttcttccaggaagtgagtgaattcttcagaggtgaacgctttgttgccttcgccagccagaacgtatttaccatctttgtagaattcagaagctgcgcagtccatcgccaaagtgatgtctttgcccagttcataaccagcagctttaacagcttcagcgataacagccagagcttcagcgttggaacccaggttcggcgcatagccaccttcgtcaccaacagcagtgttcatgcctttcgctttcagaacttttgccaggtgatggaaaacttcagaacccatgcggatggcttctttcacagttttcgcgccaaccggctgaatcatgaattcctggatatcaacgttgttgtcagcgtgctcaccaccgttgatgatgttcatcatcggaaccggcatagagtatttgcccggagtaccgttcagttcagcgatgtgctcgtacagcggcatacctttagcagctgcagcagctttggcgttagccagagatacagccaggattgcgttcgcgccgaatttggatttgttttcggtgccgtccaggtcgatcatgatcttgtcaatgccagcctgatctttagcatctttgccaatcagcgcctgagcgatcgggccgtttaccgcagcaacagctttggttacgcctttacccaggaaacgggatttgtcgccatcgcgcagttccagagcttcacgggaaccagtagaagcaccactcggagcagctgccataccgacgaaaccaccctccagatgtacttcggcttcaacagtcgggttaccacgggagtcgatgatttcacgaccgatgatttttacgattttggacattaggttttcctcaagtcactagttaaactgaaactccagacaaacaacgcgtacccagggtacgcgttgccgctctaacttttttacttacttcgcctgacgtttctggaactcgctggcggctttcacaaagcctgcaaacagcgggtgaccatcacgtggagtagaagtaaactccggatggaactggcaagccacgaaccacgggtgattcggaacttcgatgatctcgaccaactgatcatccccggaacggcccgcaacgcgcagacctgcatcttcaatctgtttcaacagcatgttgttgacttcgtaacggtgacgatgacgctcaacaattgtcggcgcattgtacagctggcgaaccaggctatcgtcaaccaactggcactgctgtgcgccgagacgcatggtaccgccgagatcgctcttctcgctacgaacttcaacgttgccgttttcatcgcgccactcggtaatcagcgccacaaccgggtacttacagtctggcacaaattccgtagagttggcgttctccatgttggcaacatggcgagcgtaatcaattaacgccacctgcatacccaggcaaatgcccagataaggaatattgttctcacgcgcaaaacgcgcggtcgtaatcatgccttctacgccacgatagccgaaaccgccaggtacgaggattgcgtccagacctttaaggatttcaacgccgcgcgtttcaacatcttgactatcgatcagtttgatgttgacgctgacacgattcttcagcccaccgtgtttcagtgcttcgatcacacttttataagcatccggcagttcaatgtacttgccgaccataccgatggtgacttcacttaccgggttcgcttcttcgaagataacctgttcccattcggacagattcgcttccgggcagtttaagctgaatcgtttacaaatataatcgtccagcccctgagatttcaacaggcccggaattttatagatggaatcgacgtctttcagagaaataaccgctttttccggaacattacagaacaatgcaatcttcgcacgttcgttcgccggaacagcgcgatcactacgacaaatcaggatgtcaggctggataccgatggagagcagctcttttacagagtgctgagtcggtttggttttgacttcaccagacgctgccatgtacggcaccagcgtcaggtgcataaacagagtgtgctcacggccaatttcaacagccatctggcgaatcgcttcgaggaacggcaaggattcgatatcacctactgtaccgccgatttctaccagtactacgtcatgaccttcgccaccttccagcacgcgctctttgattgcgttagtgatgtgcggaataacctgcacggttgcgccgaggtagtcaccgcggcgttctttacgcagaacgtcagagtagatacgacccgtggtgaagttgttgcggcggctcattttggtacgaatgaaacgctcgtagtgccccaggtccaggtcggtttcagcgccgtcttcagtaacgaacacttccccgtgttggattgggctcatagtacctggatcgacgttgatgtacggatccagtttcatgatggtcacattgaggccacgggcttcaagaatggctgcgagggaggctgcggcaatgcctttacccagagaggatacgaccccgccggtcacaaaaatatagttcgttgtcatgctgaacctgagaagttaggttgaaaagacgatggaataaccaagacgggaaagcagtatacccgaacatgacctgtgccacaaactttcattatccctcctcttcgccagcgcactattgaaatcaggagtgagaaaatagcccctttggggtaaatgtttttgacgcaaatcaagcgcttgtcatttaaaaaatgacacaaatggcgcttgaccgcgtaattcccttagagatcaatttcctgccgttttacctgttgccagacttcttccattgtttcgaggtcaacacctgtcatttccagtccacgcgcggcaacaatacgctccacttcgcgaaaacgacgctcgaatttttcgttcgctttttgcaatgcgatttctgctttcgtccctaaatggcgagccagattaaccgtggcaaacagcaggtcccccatttcctcctccagtttagcctggtcgacaacagcctgccgcgcttcgtacatcacctcgtcgatctcttcgtagactttatcgactaccggaccaagcgtcgtccaatcgaagccaacgttggcgcaacgtttctggattttttgcgcacgcattaaagccggtaaactacgaggaatatcgtccagcgcgctatgctgcgctttctgcgcgcgctcttcggttttgatttgctcccaacgggcaagcacttcactactgttttcggcagaactatcagcaaaaacatgcggatggcgacgctctaatttatcgctaatagcagcgcaaatatcattaaagtcaaagcgcccttcttcctgagccatttgcgcgtaaaacaccacctggaatagcagatcgcccagttcaccgcgaagatcgtcaaaatcttcacgggcgatggcgtccagcacttcgtaggtttcttcaagggtgtaaggcgcaatggtggcaaatgtctgctctttatcccacgggcagccgttttccggatcgcgcaggcgctgcataatagtgagcaaacggtcgatttgattcattgaattgtcctgaaaattgcgggtctgtcaggtggaaacctgtgaccagaatagaagtgagttagtaacattacccaatcagtacgttaattttggctttaatgagttgtaattcctctggggcaactgttcctttcttcgttgctcctcttgcccgccaggcgatactttttacctgatcagctaacgctacgccatcacgttcctgaccggataaaacaacttcgaacggatatcctttactttgcgttgtacaaggaacacacagacacatacctgttttgttgttgtacatgaaaggactcaggacaacagctggacgatgtccagcttgctcgctaccttttgtcgggtcaaaatcaacccaaatcagatcgcccatatcgggtacgtatcggcttaccattaccagacttccttatctttcggctctccccagtcgatattctcgtggaggttttccggcgtgatgtcgttgaccagttcagcaagcgtaaatacgggctctttacgcactggctcaataattaatttgccatccaccaggtcaatcttcacttcatcatcaatattcagattgagcgcctgcattaacgtagccgggatccgcaccgccggactatttccccaacgctttacgctactgtggatcataaccctttcctcaaaccgctatcatatgtagatacagtatatatcaatctacattgtagatacgagcaaatttcggcttaactcccgtgcaaccgacgcgcgtcgataacatccggcacctggttgagtttacccagcacgcgccccagcacttgcaggttgtaaatctcaatggtcatgtcgatggtcgccagttgctgtttggtgtcgctacggctggcaacgccaagcacgttcaccttctcgttggcgagaatggtcgtgatatcacgtaacaacccactacgatcattagctaccacgcggaccaccaggctatatccggcggagtagctctcaccccataccgcgtcaacaatgcgttctggcgcatgggagcgcagttccgccagttgttcgcaatcggcgcggtgtacactaataccgcgcccctgggtaatgaagccgacaatctcatctccaggaatcggctggcagcagcgcgcgatgtggtgcatcaggttgccaacaccttcgactaccacgcgaccgttatctttactgcggttttgcggcgtgtagcttttttgctgaagttgcttcagcgcggcggcgtcctgctcttcggcactcggcttattaaattggctttgcaggaagttcaccatctgattgagacggatatccccgccaccaatcgccgccagcaactcgtcgacatcattgaagttgtaacgcggcagcagatgtttttctgcttctttcaggctgatccccagatgttccagctcgtcgtcaaggatttgccgcccagccagaatgtttttgtcacggtcctgtttacggaaccaggcgtgaattttgctacgcccacggctggttgtgacgtaaccgaggtttgggtttaaccagtcacggctggggttcggctgtttctgggtgataatttcaatctggtcgcccatctgcagctggtaggtgaacggcacaatgcgcccgccaatttttgccccgatgcagcggtgtccgacatcactgtggatgtggtaagcgaagtccagcggcgtacttcccgcaggcaaatcaacgacatcacctttcggcgtaaagacgtacacccggtcgtcaaagacctgactacgtacttcgtcgagcatttcgccggaatcagccatctcttcctgccacgcaatcagtttacgcagccaggcaatccggtcttcatgtccgctacgtgcgccgccagcagccgcgccctctttatatttccagtgcgcagcaacacccaactctgcatcttcatgcatctgtttggtgcggatttggatctcaacggtttttccacccggccccagaaccacggtatgaatagactgataaccgtttggtttcgggttagcgacgtaatcgtcaaactcatccggcaggtggcgatagtgagtgtgcactatccccagtgcggcatagcaatcctgtaaacgctcggcgacaatacgtaccgcacgcacatcaaacagctcatcaaaggcgaggttctttttctgcattttacgccagatgctgtagatgtgtttcggacgaccatacacttccgctttaacgccttcagctttcatctcagcgcgcagatgaccaacgaactcttcgatgtagtgttcgcggtcgagacgccgttcatgcagcagtttggcaattcgtttgtattcggttggatggaggtaacggaagcagtaatcttccagttcccatttcagttgtccgattccgagacggttagccagcggtgcgtagatgttggtacactcttttgccgccagtacacgttcatcttccggcgcatcttttacttcgcgcagatgagcaatacgctccgccagtttgatgactacgcagcgaaaatcatcgaccatcgccaataacatccggcgaacgttatcgacctgttcggaggaaacagaatcagtgtgcgtcgctttcagctggcggatcgccgccatatcacgcacgccgtgaataaggttaacgacgctcttaccgacgctctcacgcagcacatcttcgctgactacgttggcatccgccagagggaaaagcagcgccgcccgcagcgtgtcaatgtccatacttaatgtgctgaggatctccaccatctcaacaccacgccacaataacagactggcatccggatgcccctgcgtctgttgcagacaatacgcccaggtttcggctaagcactcacagctcttctggctggtaatacccagacttgcgatccatttttccggatcaaattcaccagccttattgatatgtgcacttcttaccgcaaccatcgtcctctcctttagggaccagacctgccgaaatcggcaaatcgcaattatttaacgcggctgaaaagtaccatgctttccagatgtcccgtgtgtgggaacatatccagcatcgccagtcgcgcaatggtatatcctgcttttaataacgcttcgctatcccgagccagcgttgcagggttacaggatacataaactatacgaataggttccagttttataatttgctgcataacacctgcggcacctgctcgcgccgggtccagcaacactttatcgaagccgtttttcgcccacggctgctttgtgacatcttcttcaagattttcgtgataaaacgtcacattctgtaagccattaagacgcgcattctgctggcctttttccaccagcgccggaacaccttctacaccgaccacactggcagcttgtgtcgccaatggcagtgtaaagttgcccataccgcagaacagatccagtacgcgatcttcaggttgcacatccagccattccaacgcacgcgctaccattttttggttcacacccgcattgacctgaataaaatcgcgcgggctaaaagttaagcgcaacccgttactgtcataccagggcatctcaccagagacggtttcgagtatctcactatcgggggcgagatacagatccaggccttcagaatggctaaagcgttccagtttttcgcgatctgcgctacttagcggtgcggtatggcgcaaaatcatcagcgtgccgctggttgcctgtaccagttcaacatgaccaagatggcgcatagcttgtaagctgcccagacatgccctgactttgggcagcaatgcttcaagttggggcgctaaaatggggcattgtttgacgtcgacaatgtcactggagcccgctttgcgaaaccccatctgaagttgctgtgttttcggtaagtagttcagacttaaacgcgcgcgacggcgatagccccagggaacatcggcgatcacttcagagacatcgtgtttcattaatcgggcgagtgccgcacttttgcttcgctgctgtaaatccacgctggcgtgttgttgctgacagccaccgcatacgccaaaatgaggacagcgtggcgtttcgcgttccgggctatcgcttaaccggcgtacgactttagcgcgggcatactgttttttatcttcagtaacagtaacttccgcgttttcctgcggcaataatccggggataaatagcgttttgccgttatgtcgcgccacgccctgaccaaaagagtcgaggtcgttgacactaacggttatgatctgacgcgtcgtcgtgcgtcgttttgcagagtagaattgcgccattggcgagactttctcaatttaacagtgtgaccttaattgtcccataacggaactccatgaccaactacagcctgcgcgcacgcatgatgattctgatcctggcaccgaccgtccttattggtttattgctgagtatctttttcgtcgtgcatcgctataacgacttgcagcgtcaactggaagatgccggtgccagcattattgagccgcttgcagtttctactgaatatggcatgagcctgcaaaatcgcgaatctatcggtcagttaataagcgtactgcatcgtcgccattccgatattgttcgcgcgattagcgtttatgatgaaaataaccgactctttgtcacctccaattttcatcttgatcccagtagtatgcagctcggcagcaacgtgccgtttcctcgccagctcactgtcactcgtgacggcgatattatgatcctccgcacgccgattatttctgagagttactcccccgacgaaagccccagtagcgatgccaaaaatagtcaaaatatgttgggatatattgcgctggagctggatcttaaaagcgttcgcttgcagcaatataaagagatctttatttccagcgtgatgatgctgttttgtatcggtattgcgcttatttttggctggcgcttaatgcgcgatgtaaccggtccgattcgcaacatggtgaataccgtcgaccgcatccgtcgcgggcaactcgacagccgggtggaaggatttatgctcggcgagctggatatgctgaaaaacggtatcaacagcatggcaatgagcctggctgcttatcacgaagagatgcagcacaatatcgaccaggcgacgtccgatctgcgtgaaacgctggagcagatggaaattcagaacgttgagttagatctggcgaaaaagcgcgcccaggaagcggcgcgtattaaatccgagtttctggcaaatatgagtcacgagctgcgtacaccactgaatggtgttattggctttacccgcctgacgctgaaaacagaattaacaccaacgcagcgcgatcacctgaatacgattgaacgtagcgcaaataatttgctggcaattattaatgatgttctcgacttcagcaaactggaagcaggtaagctgattctggaaagtattccattcccactacgcagcacgctggatgaagtcgttactctgctggcacattcttctcacgataaagggttagaactgacgctcaatattaaaagcgacgtgcctgataacgtgatcggcgacccgctgcgattacagcaaatcatcactaacctggtggggaatgcaattaaattcaccgagaatggcaacattgatattctggtagaaaaacgtgcgctgagtaataccaaagtgcagattgaagtgcagattcgggataccggcattggtattcctgaacgcgatcaaagccgcttattccaggccttccgacaggctgatgccagtatttcccgccgtcatggtggcaccgggctggggctggtgattacacaaaaactggttaatgaaatgggcggcgatattagcttccatagccagccgaatcgcggtagtactttctggttccacattaatctcgatctgaacccgaacattattatcgaagggccatccacccagtgcctcgcaggtaagcgcctggcctatgtcgaaccaaactccgcagcagcgcaatgcacgctggatattttaagtgaaacgccgctggaagtggtttatagcccaacgttctccgcgctgcctcccgcgcattacgacatgatgttgttaggcatcgcggtgaccttccgcgagccgctaacaatgcaacatgagcgattagcgaaagcggtaagcatgaccgatttcctgatgctggcacttccttgccatgcacaagtcaatgctgaaaaactcaagcaagatggtatcggcgcgtgtctgctgaaaccattaacacctacacgcctgttgcctgccctgacggaattttgtcatcacaaacaaaacacgcttttgcctgtaaccgatgaaagtaagctggcaatgacagtcatggcggttgatgacaaccccgctaacctgaaacttatcggcgcattgctggaagatatggtgcaacatgtggaactttgcgatagcgggcatcaggcggttgaacgggcgaaacagatgccgttcgatttgatcttaatggatattcaaatgccggacatggatggcattcgggcctgcgaactcatccaccaactcccgcatcagcaacaaacgccggttatcgcggtaacggcgcatgcaatggccgggcaaaaagagaagctgcttggcgcagggatgagcgattatctggcgaaaccgattgaagaagagcgattgcataatttgttgttgcgctacaagcctggcagcggtatttcctctcgcgtcgtgacgcccgaagtcaacgaaattgtggtgaacccgaatgcgaccctcgactggcaactggcactacgccaggcagcaggaaaaaccgatttagcgcgcgatatgctgcaaatgttactcgatttcctgcctgaagttcgcaacaaagttgaggaacagctggttggagaaaacccggaaggcctggttgatttgattcataaactgcatggcagttgcggctatagcggtgtgccacgtatgaagaatctctgccaactgatcgaacaacagctacgtagcggtactaaagaagaagatttggaaccggagctgctggaactgttggacgagatggataatgtcgcgcgcgaagccagcaaaattctcgggtaatggatgtcttgtcgagtagcaatcggctttttatgacgctggtttcagattggtgacaaagtgcctgtgtttatgccggatgcggcgttaacgccttatccggcctacaaaaccaattaaattcaatgaattaaaaaatgatgtagacctgatacatagcacaacaggctattttgcgtttagcatcagtctcaaaccggctccagatagagccggttttggttttctgtcttaacgcaccatgcacgggcgcttgttatcgaacgtccagccaggaatcagatactgcattcccatcgcatcgtcacgcgcgccaagcccgtgtttctgatacagctcatgggctttcatcacttgatccatatcgatttctacacccagccccggtttttctggcacctgtaccagcccgcctttgatctcaaacggttctttggtcaggcgctgattgccttcctgccaaatccagtgcgtatcaatagcagtaattttacccggtgcagcggcggcaacatgggtaaacatcgccagggaaatatcgaagtggttgttagagtgactaccccaggtcaggccaaattcatggcacatttgcgccacacgtacgctaccttgcattgtccagaaatgcggatccgccagcgggatatcaacggattgcagggagagcgtatggcccatttgccgccagtcggtggcgatcatattggttgcagtcggtagacctgtcgcgcgacggaactctgccatcacttcacgcccggagaaaccttgctccgcaccacacggatcttctgcataagccaggctacctttcaggtatttaccgattttaatcgcttcgttcaggctccaggcaccgttaggatcgagcgtaatacgcgcctgcgggaagcgttgcgccagtgccacaatagactcggcctcttcttccccggccagtacaccgcccttcagtttgaaatcgttgaagccatatttttcatatgccgcttccgccaggcgcaccaccgcatccggcgtcatcgcttcttcatgacgcaggcgataccagtcgcaactgtcatccggctggctttgatacggcagcggcgtggctttgcgattaccgacgaagaacagataaccgagcatttcgacttcgctacgctgttgaccatcgcccagcaggcttgccacgtttacccccagatgctgccccagcagatccagcattgccgcttctatcccggtaactacatgaatagtggtacgtaggtcaaatgtctgcaaaccgcgcccaccagcatcacgatcggcaaaagtattacgcaccagcgtcagaacgtttttgtattcacccagcgttttacctaccaccagcggaatcgcatcttccagcgttttacggattttctcgccgccgggaatttcccctacgccagtgtgaccagaattatctttgataatcacaatattacgcgtaaagaacggtgcgtgtgcaccactcagattcatcagcatactgtcatgacccgccaccgggataacctgcatttcagtaacaacaggcgtcgtaaattgagaactcatatttatgtcctttttcagaatcaatgacggccgaaaacgggacgtttacggtcaaaggtccagccggggatcaggcactgcatcggacctgcgtcgttacgcgcaccgccaggcagacgtttataggcctcatgtgccttttgtacctgttcccagtccagttccacgcccagaccgggcgcatcaggaacggcaatttttccgtttttaatctccagcggattttgggtcaggcgacaatcgccctcctgccaaatccagtgggtatcgatagcggtaggattacccggtgccgccgcgcccacatgggtaaacatcgccagagagatatcgaaatggttattagaatggcagccccaggtcagcccccagtcgtcgcaaagctgcgccacacggactgcaccggaaagcgtccagaagtgcggatcggcaagtggaatatctaccgcattgagcatcaccgcatgacccatttcgcgccagttggtggcgatcatgttagtcgcgacgggcaagccggtcgcccgtcgaaattccgccatcacttcacgtccggagaagccctgttctgcgccgcatggatcttcggcataggtaagaacatcattcagccctttgcataaagaaatggcttcatcaagcagccatgcaccgttgggatcaacggtaatccgcgcatccgggaagcgtttcttcaatgcacgaacagtgtcgatttcttgctcgccaggtaacacgccgcccttaagtttgaaatctttaaagccgtagcgatcctgactggcttccgccagacgcacaacggcttcgctgttcattgctttctgatgccgcaactgataccactcatggttgcccggcgtattttccacataaggaagatcggttttggtccgatcaccgatataaaacagataaccgaggacggtaatagcctcgcgttgcttgcctggccctaacagttcgcagaccggaacattcagcgccttacctagcaggtcaagcaaagcggcttccagcgccgccacggcgttaacgcgtaattcaaaggtccaggcacctttaccgaaggtatcaaaatcggcggcctgattacctttatgcacctgctggaccactttattcagtcgcgcaacttcctggcccagaaccatcggaatagcatcgacaagcgtctgataaatcacatctccgcccggcgcttcaccaatgccggtatgcccggcgttatcggtgagtaccacaatattgcgggtgaaatatgcgttatgtgccccaccaatattaagcaacatgctgtcatgcccggccaccggaatgactttcatatcagtaataacaggactggattgtgtcgccatcttattgccccgcaacaggtttcaactcgatacgcttgatatcgcccaccagcaccaggtagctcagtaccgcgattaaggcatgaacaccaacataaatcagcgccccattaaagctgccagtcgtgccaacgatataaccaattgcgattggcgtgacgatgccagaaatgttaccgaacatgttgaacaggccaccggaaagaccgctgatctcttttggcgcggtatctgccattactgcccaacccagcgccccgatgcccttaccgaagaaggccagcgccataaagccgatgatcatccactcaacgttgacgtagttgcagaacaccatcaccatgctcagcaacatgcccattacgatcggtgttttacgcgcaatgttcaggcttcccgtgcggcgcatcagccagtcggaaataatcccacccagcacaccgccgataaaaccgcaaaccgccggaacggaagccacaaagcccgctttcagaatgctcatcccgcgtgcctgcaccagataaaccgggaaccaggtaataaagaagtaagtcagggcgttgatacagtactgaccgatataaacgccgatcatcatccgactccctagcagctgtttgatctgcccccacttcacgctgaacggcactttaactttggtgttttgctgatccatattgatcagcgcaccacccgcggcgatgtactccagctctttcttatttacccccggatgttgatttggctcgtggatgactttcaaccagataaagctgatgacaatccccagaccgcccataaagaagaagacgtgactccagcccacttcatgcgtcagccagcccataatcggcgcgaagatcaccgttgcgaagtattgagcggagttaaaaatgctcaccgccgttcccctttcctgcgccggaaaccaggccgcaacaatgcgactgttgccggggaaagatggcgcttcagcaagcccgaccaggaagcgcagcgtaaacagggcaacgataatgccgaatccactaaagatatcgacgaagccttgcagcaaggtaaacatgctccagataaagatgctccagaagtagacgcgtttactaccaaaacggtccagcaaccagccaccagggatctgcccgataacataagcccaactgaaagcagagaacacatagcccattcccacgggatcaaggccgatatctttggccatttcgctaccggcgatagagagcgtagcgcggtcgccgtagttgaaggatgtgacgataaacaacatcaccactatccagtaacgagcatttgtgcgtttttccacactgctcgcagcctgacttaaagaactcattgttgcactcctgaaaattcgcgttagccacgctcactctggactgcgacatcgccaggaaatcagaggtgacgtagggtgttttttgccgtttttataggtcgttcgccgaatacggcgcgtgtttatatctggcaatagcagtataaaaagcgcgccatagcggctcaccgtgcaacaacacaacattaatgcgttcaatgaggcccgattttggcattagccctggacggtggaatccacttcacggaaatgaaaacaagaacaagaaaggaagggttaaaacgaagaaataaagaagagtatgaaatggatcgcttgactccaggcaaacgccagtaaaaatccgcgctatgaagcagtttttactggcatttgcctgaaaagattcgattcagcaccgctaaaacgacatttaccgctcgctgaacatatcaggacaacagcgtgccccactgttcgacccacggattactttccgtttccggttccgggttctcactggcgtcaatcaacagcatttcgccaacccgctgagcgctctgttcctgcaacaaggcatcgaactgtttgccgccattgcagaaattcacataactactgtcgccgagcgcaatcacgccataacgcagattcggctggaagcccagactatctttgattccctgaaagagtggcacaatgctatcaggaaggtcgccctgcccggtcgtggacgtaaccaccagaacatacttatcctgatagggcagccagtcgcttaattcaggatcttcaaataccgttgctttgtggccctgcgcggtcagaatcgcttccgcttcttcggccactaacagactattcccgtacatggtgccgacaaaaataccaatttccgccataccgttttctccctggattaggaacttatctctccatcctgaccgcttggcgcactgaactcaaccctttcattttcaggaagcagaccgcgccagccaaattgacttaacgcctgcatccaggtgtcgtccaggcccgcgtgaatagtcagcggctcgccagtaaaaggatgcgtcaaactcaactgactggcatgtagcattaaccgctggaggccaaaatgctcagcaccgctgcgattctggcgtaaatcgccatgtttgctatcgccaataatcggatgacgcaaatgggcaagatgtcggcgaagctgatgtttgcgtccggttttcggctccagttccaccaggccgtagcgcgtggtcgggtaacgtccggtcgctaccggcatttctacggtcgccagaccgcgataatgcgtcactgctggctgcgggcctttatcttcgcgggcaaatttatcagcgattttgtccagttcttccaccagtggataatccagcaccgcttcttccatcaaccagccgcgcacaatcgcatggtaacgtttctggatttggtgctgttcaaactgttgtgccagcagccgtccggcctcgctggataatcccatcaacaacacaccagaagtgggtcggtccagacgatgagcagtaaaaacatgctggcctatctggtcacgcacggtttgcatgaccactactttctcgtcgcgatccagccagctgcggtgaaccagccagccggagggtttatttaccgcaaccagccattcatcctgatagagtatttccagcattagctcgcatcatccgcaaaaagagcatccagtttttccagctcagccagaataagcgcgcgttgcggatggtccgtcgccagcgccatttcataatagggtgcaacggcaaaagcgcccggtaacggctgtttgttatctaacaaatcgtgcattcgcgggatcagcacccactgcaaccactccagtggttccatggtgtccataaagaacggttgggtactattaaattgatgcggctggggttcatcgtttcgccagtgctgatgttcacgcagtaacgcttcaagcgcctgcaactggagacgaacgcggtcatgagtggtcataaagcaacctcaataagaaaaactgccgcgaaggatagcaggaataaaaaaagggagcactgtattcacagcgctcccggttcgtttcgcagcattccagctacttttgttgctccctgctcatccttgacaacttttcctctggccttgcggccaatcgttcatcctgaactattgcttcctgctcacaccaccccgatgtgatacttcatcctgaagtgtccctggccttcctgacccaccgaatcatcctgaccggttctcattctccatcctggaggtgtcctttaacgcgtcctgcgtcatcctcttcgcttcatccagaagcctttccctgaaacaccatcctggtgtgtcctgcagaagtgtcatcatcctgatgttcacttcgttgtctgactccctgtcgacgaagatagaatcgtctttttcgcgaagtcttacaaggcgcttacagacaatgccttaaggaaaatttcatatgaaagttaagaattaacaatcaacattttgattttaaatgaaaataacgattcttatctttttaagtattcgcttatttcctggcgatctcctacagagtctgtaagagatctctcacaaccagatggggtatttggattacagaagaggcttaagttgattaaggaattccgcaagattactggctaaatgcgtccgtttacgtgttcccagcgtctctttgcacacttcaccggagagattacacacgctgatgacctctaactcttcttccagcgtcgcgataaatagtgtgggcggcagttttagccttttctgagtcaccagatgaccaatcagattttcctgcacccgacggaagtcgtcttcactccaggtttgcagcaatgtcagtttgatatcgccaaactgcgcgtgcatatccccggcaaactgagtcgtataaaaggtatgaattgtgggttgtatcacaatatcaaaagcgcgttcaaccgcgtttacattttgttccccggtaaacggctggggttgccagtatacggcatcttcggtagtactaataatgcacggactaggaacaccgtacagttcctcacttaacggccagcttttatgctcttcatgccacgcatcgcagtagcgtgcagtaaaatctttcagggcttgtgcggtcaaatcgtccactaatttctctcttcacttaaaccagatacacttgtcgtttagtttatctggtttatgacggtgaaacatgtcttcttatgcaaaccatcaggcacttgcgggcctgactcttggaaaaagtaccgattaccgggatacctatgacgccagcctactgcaaggcgttccacgcagcctgaatcgcgacccgctgggtctgaaagcggataacctgccttttcacggtacggatatctggacgctgtatgaactttcctggctgaatgcgaaaggtttgccgcaggtcgctgtcggtcatgttgaacttgattacaccagcgtaaatctgattgagagcaagagttttaagctctatctcaacagttttaaccagacgcgttttaataactgggatgaggtgcgccagacgctggagcgcgacttaagcacttgcgctcagggtaagattagcgtggcgttatatcgtcttgatgaactggaaggccagccgataggtcattttaatggcacttgcattgatgaccaggatatcactatcgataactatgaattcactactgactatctggagaatgccacctgtggtgaaaaagtagtggaagagacgcttgtcagccacctgctgaaaagtaactgcctgatcacccatcaaccagattggggtagcctccaaattcagtatcgtggacgccaaattgacagagaaaaactgctgcgttacctggtcagtttccgtcatcacaacgagttccacgaacagtgcgtggaacgcatctttaatgacctgttacgcttctgccagccagaaaaattgagcgtttacgcacgttatacccgtcgtggcggtctggacattaacccgtggcgcagtaatagcgattttgtcccaagcaccacaagactggttcggcaataaatttttctcaattttgcgtgctggattcacgcagaaggttgtgaaaggtcatcaggcagggctattgtaatcaaagggaatgacgatattcgtcccataaggagtttttcttgattacacatattagcccgcttggctccatggatatgttgagccagctggaagtggatatgcttaaacgcaccgccagcagcgacctctatcaactgtttcgcaactgtagtcttgccgtactgaactccggtagtttgaccgataacagcaaagaattgctgtctcgttttgaaaatttcgatattaacgtcttgcgccgtgaacgcggcgtaaagctggaactgattaatcccccggaagaggcttttgtcgatgggcgaattattcgcgctttgcaggccaacttgttcgcggtcctgcgtgacattctcttcgtttacgggcaaatccataacaccgttcgttttcccaacctgaatctcgacaactccgtccacatcactaacctggtcttttccatcttgcgtaacgctcgcgcgctgcatgtgggtgaagcgccaaatatggtggtctgctggggcggtcacagtattaacgaaaacgagtatttgtatgcccgtcgcgtcggaaaccagctgggcctgcgtgagctgaatatctgcaccggctgtggtccgggagcgatggaagcgccgatgaaaggtgctgcggtcggacacgcgcagcagcgttacaaagacagtcgttttattggtatgacagagccgagcattatcgccgctgaaccgcctaacccgctggtcaacgaattgatcatcatgccagatatcgaaaaacgtctggaagcgtttgtccgtatcgctcacggtatcattatcttccctggcggtgtgggtacggcagaagagttgctctatttgctgggaattttaatgaacccggccaacaaagatcaggttttaccattgatcctcaccggcccgaaagagagcgccgactacttccgcgtactggacgagtttgtcgtgcatacgctgggtgaaaacgcgcgccgccattaccgcatcatcattgatgacgccgctgaagtcgctcgtcagatgaaaaaaagcatgccgctggtgaaagaaaatcgccgtgatacaggcgatgcctacagctttaactggagtatgcgcattgcgccagatttgcaaatgccgtttgagccgtctcacgagaatatggctaatctgaagctttacccggatcaacctgttgaagtgctggctgccgacctgcgccgtgcgttctccggtattgtggcgggtaacgtaaaagaagtcggtattcgcgccattgaagagtttggtccttacaaaatcaacggcgataaagagattatgcgtcgtatggacgacctgctacagggttttgttgcccagcatcgtatgaagttgccaggcagtgcctacatcccttgctacgaaatctgcacgtaatctccgctcccccggtgacgtttgttgccgggttttctcgtttttggtcacttactcatcaactcatttcatttgttatatgaatgtttctcaccaccctcacgcgacaaatatcatcacagttaatatgtcatacaatttatgttgcaacgcaaacgtttccctattttcataaaccgtattttatcgctatgaaaaagaaattatcgccatgattaactaaaagtattgattttttcagttcaacctacatatattgcgcgccccggaagaagtcagatgtcgtttaatgggcaaatattgcccttaaattctcttttacttttgatttacagagtaaagcgttgggataatctatcttccaagtagattattgtatttgagatcaagatcactgatagatacataacttgtgtgtatctttccgccctcaaattattacggcggtaaatgattaagccatcgccgatagacagatttcatttttacggtcaggcaccttcccgggctgaactggctaaaagctgaattatttgcattcctccaggagaaatagatggaaacgactcaaaccagcacgattgcgagcaaagactctcgtagtgcctggcgcaagacagacaccatgtggatgctgggcctttacggcacggcaatcggcgcgggcgtgctgttcctgccaatcaacgccggtgttggcggtatgatcccgctgatcatcatggctatccttgcgttcccgatgacgttttttgctcaccgcggcctgactcgcttcgtactgtctggtaaaaacccgggcgaagacatcaccgaggttgtagaagaacactttggtattggcgcaggtaaactgattaccctgctctacttcttcgctatctacccgatcctgctggtttatagcgtggcaatcaccaataccgttgaaagcttcatgtctcaccagctgggtatgacgccaccgccgcgtgcgattctgagcctgatcctgatcgtgggtatgatgaccatcgttcgcttcggtgagcagatgatcgttaaagcgatgagtattctggtattcccgtttgttggcgtactgatgctgctggctctgtacctgatcccgcagtggaacggcgctgcactggaaacgctgtctctggacactgcatctgcaaccggaaacggtctgtggatgaccctgtggctggcaattccggtaatggtgttcagcttcaaccactctccgatcatctcttctttcgccgttgcgaagcgtgaagagtacggcgatatggcagaacagaaatgcagcaagatcctggcattcgcacacatcatgatggtgctgaccgtaatgttcttcgtcttcagctgtgtactgagcctgactccggcagacctggctgcggctaaagagcagaacatcagcattctgtcttacctggctaaccactttaacgcaccggttatcgcgtggatggctccgattatcgcgattatcgctatcaccaaatccttcctcggtcactacctgggcgcacgtgaaggcttcaacggtatggtgattaaatctctgcgtggtaaaggtaagtctatcgaaatcaacaagctgaaccgtatcactgcgctgttcatgctggtaacgacctggattgttgccaccctgaacccgagcatcctgggtatgattgaaaccctgggcggtccaatcatcgcgatgatcctgttcctgatgccgatgtacgcaattcagaaagtaccggcaatgcgtaagtacagcggtcacatcagcaacgtattcgttgtcgtgatgggtctgattgcaatctccgcaatcttctactctctgttcagctaagtcctttcgcgccgctttcgggcggcgcttcctccgttttaacgcgatgtatttcctatgattagcgtattcgatattttcaaaatcggcattggcccttccagttctcataccgttggaccaatgaaagcgggtaaacaatttaccgacgatctgattgcccgtaacctgcttaaagacgtgacccgcgtggtggttgacgtgtacggcagcctctctctgaccggtaaaggccaccacactgatatcgccattattatgggcctggcgggtaacctgccggataccgtggatatcgattccatccccagttttattcaggatgtgaatactcatggtcgcctgatgctggcaaacggtcagcatgaagtggagttcccggttgatcagtgcatgaacttccacgccgacaacctttctctgcatgaaaacggtatgcgcattaccgcgctggcgggcgataaagtcgtttacagccagacttactactctattggcggtggctttatcgttgatgaagagcattttggccagcaggatagcgcaccggttgaagttccttatccgtacagtagtgcagccgatctgcaaaaacattgtcaggaaaccgggctgagtctctctggcctgatgatgaaaaacgagctggcgctgcacagcaaagaagagctggaacagcacctggcgaacgtctgggaagtcatgcgcggcggtattgagcgcggtatttccaccgaaggcgtgttgcctggcaaactgcgcgttccacgccgtgctgcggcactacgccggatgctggtcagccaggataaaaccaccactgacccgatggcggttgttgactggatcaacatgtttgcactggcagtgaacgaagagaacgctgctggcggtcgcgtggtgactgcgccgactaacggtgcgtgcgggattatcccggcagttctggcgtactacgacaagtttatccgcgaagtgaacgctaacagtctggctcgttacctgctggtagccagcgccattggttctctttataagatgaacgcgagcatttctggtgctgaagtgggttgccagggtgaagttggcgtggcgtgcagtatggcggcggctggtctggcagaactattaggcgcaagcccggcgcaggtgtgcatcgcggcggaaatcgccatggagcacaacctcggtctgacgtgtgacccggtcgccggacaggtacaggtgccatgcatcgagcgtaacgccattgcggcagtaaaagcggtgaacgccgcacgtatggcgctgcgccgtaccagcgagccgcgcgtctgcctcgataaagttatcgaaaccatgtacgaaacaggtaaagatatgaacgccaagtaccgcgaaacctctcgcggcggcctggcaatgaagatcgttgcctgcgattaatcgctctccaaaggcctcgttttgcgaggcctcttcccgatttctcatccagccgtagcctgttccggcatcgaatgttacccttatcgcctgatctttaagggggttatcgtggctgttcatttgcttattgtcgatgcactgaatcttattcgtcgcattcatgccgttcaggggagcccctgtgtcgaaacctgccagcatgcgctcgatcagctcattatgcacagccagccaacccacgcggtcgccgtttttgatgatgaaaaccgcagtagcggctggcgtcatcagcgtttaccagattacaaagcgggtcgaccgccaatgccggaagagttgcacgacgagatgcctgcattacgcgccgcctttgagcaacgcggcgtcccgtgctggagtaccagcggcaacgaagccgatgacttagccgccacgctggcggtcaaagtgacacaggccgggcatcaggcaacgattgttagcacagataaaggctactgtcagttacttagtccgacattacgtattcgtgattacttccagaaacgttggctggatgcgccatttatcgataaagaatttggcgttcaaccgcagcagttgcccgattactggggacttgcggggatcagcagtagtaaggtaccgggtgttgcgggaatcggaccaaaaagcgccacgcagctgctggtcgagtttcagagtctggaagggatatatgagaatctggatgcggttgccgaaaagtggcgcaaaaaattagaaacccataaagagatggcgtttctgtgccgcgatattgcccgcttacaaaccgatttgcatatcgacggcaatttacagcaattgcggttggtacggtaacggcgagccggatacgccgcaaacgtcgtatccggcattatcacatcagcgcatttaccaggcggtatggtaaagctctacaatatcctcaagcgttgcttcacgcgggttgccaccggtacaaacatcatccagtgccgcctgcgccagtgccggaatgtcttccttgcgtacaccaacatcacgcaaatgtggcggaataccgacatcacggttgagagcaaacaccgcttcaacagcggcattacgcgcctcttccaggctcataccttccactttcacgcccataacgcgcgcgatatcgcggtacttctcaccggtaaagtcagcgttataacgcatgacatgcggtaacaggatggcgttcgcaacaccgtgtggagtgttataaaacgcgcccagtggatgcgccataccatgcaccaaccctaacccaacattgctgaagcccatacccgcaacatactgcccgagcgccatttcttctccggcatccttatcaccagcaacgcttcctcgcagcgccccagcaatgatttcaatcgctttaatgtgcagtgcatcggttagcgcccacgcgccacgggtaatatacccctcaatagcatgagtgagcgcatcgacacccgtcgcagctttcagcgctggaggcataccatccatcatgtcagcgtcaataaacgccacctgcgggatatcatgcggatcaacgcaaacaaacttgcgccgtttctcttcgtcagtgatcacgtagttaatggtcacttctgccgcagtacctgctgtggtaggaattgccagaatcggtacactgggtttattggtcggggaaagcccttccaggctacgcacatcggcaaactccgggttgttgctgataatgccaatcgctttacaagtatcctgtggagaaccaccaccaatagcgatcaggtaatccgcgccgctattctggaatacaccgagcccttctttgacgacagtaattgttgggttgggcactacgccgtcgtaaatcgcccatgccagccctgcagcatccatcttatcggtcactttcgccaccacgccgcattgcaccagcgttttatcggtgacgatcagcgccttctgataaccacggcgtttcacctcatcggttaaagccccaacagcaccccgaccaaaccatgccgtttcgttcagaatcattctgttagccatcatccttctccttgttgctttacgaaattactcttcaattcgtaacccataggttttgaatttctccagcactacggcaatctcttcatcgctcagcactggcaccgggtccgtaatcgccagggtcgtcaggtaaagttgcgccagcacttcaacttcatgcgccagccataacgctttttccagattcacctcacaagcgataagcccatgatgttgtaacaaagttgccttacgatttttgagagccagcgcaacatgttcagaaagttcgcgtgttccaaaggtcgcataaggcgcgcaaggaatagaattaccgccagccgccgcaatcatgtagtgaatagcggggatgcttcggttaagaatggaaactgccgtgcaatgaacggcatgattgtgaacaaccgcgttggcatccggtctgctttgataggctgccatatggaaacgccattcgctactggggagctttccttcctcatgtttaccgttgccatcaataaagacaatatggctctccgtcagtttttcatatggaatgcctgtaggcgtaatcagcatcccatcctgataacgtacactgacgttccccgctgtcccctggttcagtcccaggcgggtcatttccaggcaagtgtcaataatctgacgagcaagtttatttcgttccattagctacctctctctgattcaaaacagggcaataatgttgttcctttcacactattgaattagccgtttaattacccaccatcttcttcctgattaacaagaaagaaattcacaagcttatattttgtgacctggttcaactaatcacagtaaataactgcaagttctctttttataaccccattaaaaatgaccgctcttaaaaatatttatcaaaacggtcatttttctattcctccaagcccggaatgaccgttttcggcacaaacaattaatacggtcatctgatttgtgttttttatgatttattttctgaaacgggcatgaaatttcgattattaaagtgatggtagtcacataaagtcaccttctagctaataagtgtgaccgccgtcatattacagagcgttttttatttgaaaatgaatccatgagttcatttcagacaggcaaatattcactgatatgaagcccgaactcgctggttttgcacttttgaaaacataaccgattacgtgcttaagcttctgaacctaagaggatgctatgggaaacacaagtatacaaacgcagagttaccgtgcggtagataaagatgcagggcaaagcagaagttacattattccattcgcgctgctgtgcagtctgttttttctttgggcggtagccaataaccttaacgacattttattacctcaattccagcaggcttttacgctgacaaatttccaggctggcctgatccaaagcgccttttactttggttatttcattatcccaatccctgctgggatattgatgaaaaaactcagttataaagcagggattattaccgggttatttttatatgccttgggtgctgcattattctggcccgccgcagaaataatgaactacaccttgtttttagttggcctatttattattgcagccggattaggttgtctggaaactgccgcaaacccttttgttacggtattagggccggaaagtagtggtcacttccgcttaaatcttgcgcaaacatttaacagctttggcgcaattatcgcggttgtctttgggcaaagtcttattttgtctaacgtgccacatcaaagccaagacattctcgataaaatgtctccagagcaattgagtgcgtataaacacagcctggtattaagcgtacagacaccttatatgatcatcgtggctatcgtgttactggtcgccctgctgatcatgctgacgaaattcccggcattgcagagtgataatcacagtgacgccaaacaaggaagcttctccgcaagcctttctcgcctggcgcgtattcgccactggcgctgggcggtattagcgcaattctgctatgtcggcgcacaaacggcctgctggagctatttgattcgctacgctgtagaagaaattccaggtatgactgcaggctttgccgctaactatttaaccggaaccatggtgtgcttctttattggtcgtttcaccggtacctggctcatcagtcgcttcgcaccacacaaagtcctggccgcctacgcattaatcgctatggcactgtgcctgatcagtgccttcgctggcggtcatgtgggcttaatagccctgactttatgcagcgcctttatgagcattcagtacccaacaatcttcagcctgggcattaagaatctcggccaggacaccaaatatggtagctccttcatcgttatgaccattattggcggcggtattgtcactccggtcatgggttttgtcagtgacgcggcgggcaacatccccactgctgaactgatccccgcactctgcttcgcggtcatctttatctttgcccgtttccgttctcaaacggcaactaactgaacatattttccgaataaagtgaggaatctgtaatgaaaaaaatcagcttaccgaaaattggtatccgcccggttattgacggtcgtcgcatgggtgttcgtgagagccttgaagaacaaacaatgaatatggcgaaagctacggccgcactgctgaccgagaaactgcgccatgcctgcggagctgccgtcgagtgtgtcatttccgatacctgtatcgcgggtatggctgaagccgctgcttgcgaagaaaaattcagcagtcagaatgtaggcctcaccattacggtaacgccttgctggtgctatggcagtgaaaccatcgacatggatccaacccgcccgaaggccatttggggctttaacggcactgaacgccccggcgctgtttacctggcagcggctctggcagctcacagccagaaaggcatcccagcattctccatttacggtcatgacgttcaggatgccgatgacacaagcattcctgccgatgttgaagaaaaactgctgcgctttgcccgcgccggtttggccgtcgccagcatgaaaggtaaaagctatctgagcctgggcggcgttagcatgggtatcgccggttccattgttgatcacaacttctttgaatcctggctgggaatgaaagtccaggcggtggatatgaccgaactgcgtcgccgtatcgatcagaagatttacgacgaagccgaattggaaatggcactggcctgggctgataaaaacttccgctatggcgaagatgaaaataacaaacagtatcaacgtaatgccgagcaaagccgcgcagttctgcgcgaaagtttactgatggcgatgtgtatccgcgacatgatgcaaggcaacagcaaactggccgatattggtcgcgtggaagaaagtcttggctacaacgccatcgctgcgggcttccaggggcaacgtcactggaccgatcaatatcccaatggtgacaccgccgaagcgatcctcaacagtagttttgactggaatggcgtgcgcgaaccctttgtcgtggcgaccgaaaacgacagtcttaacggcgtggcaatgctaatgggtcaccagctcaccggcaccgctcaggtatttgccgatgtgcgtacctactggagtccagaagcaattgagcgtgtaacggggcataaactggatggactggcagaacacggcatcatccatttgatcaactccggttctgctgcgctggacggttcctgtaaacaacgcgacagcgaaggtaacccgacgatgaagccacactgggaaatctctcagcaagaggctgacgcttgcctcgccgctaccgaatggtgcccggcgatccacgaatacttccgtggcggcggttactcttcccgcttccttaccgaaggcggcgtcccgttcaccatgactcgtgtcaacatcatcaaaggcctgggaccggtactgcaaatcgcggaaggctggagcgtggaattgccgaaggatgtgcatgacatcctcaacaaacgcaccaacagtacctggccaaccacctggtttgcaccgcgcctcaccggtaaagggccgtttacggatgtgtacagcgtaatggcgaactggggcgctaaccatggggttctgaccatcggccacgttggcgcagactttatcactctcgcctccatgctgcgtatcccggtatgtatgcacaacgttgaagagaccaaagtgtatcgtccttctgcctgggctgcgcacggcatggatattgaaggccaggattaccgcgcttgccagaactacggtccgttgtacaagcgttaatacattactccctgatgtgatgcccggtcgctccggctaccgggcctgaacaagcaagagtggttagccggataagcaatgttatccggctatattgcaggagcgattatgaaacaagaagttatcctggtactcgactgtggcgcgaccaatgtcagggccatcgcggttaatcggcagggcaaaattgttgcccgcgccagtacgcctaatgccagcgatatcgcgatggaaaacaacacctggcaccagtggtctttagacgccattttgcaacgctttgctgattgctgtcggcaaatcaatagtgaactgactgaatgccacatccgcggtatcgccgtcaccacctttggtgtggatggcgctctggtagataagcaaggcaatctgctctatccgattattagctggaaatgtccgcgaacagcagcggttatggacaatattgaacggttaatctccgcacagcggttgcaggctatttctggcgtcggagcctttagtttcaatacgttatataagttggtgtggttgaaagaaaatcatccacaactgctggaacgcgcgcacgcctggctctttattagcagcctgattaaccaccgtttaaccggcgaattcactactgatatcacgatggccggaaccagccagatgctggatatccagcaacgcgatttcagtccgcaaattttacaagccaccggtattccacgccgactcttccctcgtctggtggaagcgggtgaacagattggtacgctacagaacagcgccgcagcaatgctcggcttacccgttggcataccggtgatttccgcaggtcacgatacccagttcgccctttttggcgctggtgctgaacaaaatgaacccgtgctctcttccggtacatgggaaattttaatggttcgcagcgcccaggttgatactagcctgttaagtcagtacgccggttccacctgcgaactggatagccaggcagggttgtataacccaggtatgcaatggctggcatccggcgtgctggaatgggtgagaaaactgttctggacggctgaaacaccctggcaaatgttgattgaagaagctcgtctgatcgcgcctggcgcggatggcgtaaaaatgcagtgtgatttattgagctgtcagaacgctggctggcaaggagtgacgcttaataccacgcgggggcatttctatcgcgcggcgctggaagggttaactgcgcaattacagcgcaatctacagatgctggaaaaaatcgggcactttaaggcctctgaattattgttagtcggtggaggaagtcgcaacacattgtggaatcagattaaagccaatatgcttgatattccggtaaaagttctcgacgacgccgaaacgaccgtcgcaggagctgcgctgttcggttggtatggcgtaggggaatttaacagcccggaagaagcccgcgcacagattcattatcagtaccgttatttctacccgcaaactgaacctgaatttatagaggaagtgtgaaatgctgaaaacaattagcccgttaatttctcccgaactattgaaagtgctggcagagatgggacatggagatgaaattattttttccgatgctcactttcccgcccatagcatgggaccgcaggtgatccgcgctgatggcctgttggtgagcgacttgctccaggcgattatcccgttatttgaactggacagttatgcaccgccgctggtgatgatggcggcggtagaaggtgacactctcgatcctgaagtagaacgacgttaccgtaatgcgcttagtctacaagccccgtgtcctgacatcatccgcatcaatcgttttgcgttttatgaacgggcgcaaaaagcctttgcgatcgttatcacaggcgaacgagcgaagtacgggaatattcttttaaaaaaaggggtaacaccgtaatctcataccggtacgcccgcatgacgcgggcggttatcgaatgatggggtgaaaaatatgaaagcggcacgccagcaagcgatagtcgacctgctgctgaaccataccagcctgaccacggaagctctctctgaacagctaaaggtcagtaaagaaaccattcgtcgcgatctcaatgaattacagacgcagggtaaaattctgcgcaatcatggacgcgctaaatatatccaccgtcaaaatcaagacagtggcgatccctttcacatcaggctgaaaagccattatgcgcataaagcagatatcgcgcgcgaggcgctcgcgtggattgaagaagggatggtgatagccttagacgccagtagtacttgctggtatctggcacgccagttgcctgacatcaacattcaggtcttcaccaatagccatccgatttgccatgaactcggtaaacgcgaacgcattcaactgatcagttccggcggcacacttgagcgcaaatatggctgttacgtcaatcccagcctgatttcccaacttaaaagcctggaaatcgatctgtttattttttcttgtgaagggatcgatagcagcggcgcactgtgggactccaatgcgatcaacgctgattacaaaagcatgctattaaaacgtgccgcgcaaagcttgttattgattgataaaagtaaatttaatcgtagtggggaagcccgcatcgggcatctggatgaggtaacgcacattatttctgatgagcgccaggttgcaacttctttggtaacagcctgacggaaagggtagcaggccggagacgacgccccggccttgcctgttatcgctcgtcgcgacgaccacccaccgcagcccagatgcggcggacgtgcaccgtcacttcttcgcgatcgtgatacaactgccgcgcctgaatctgagcatttatgccatgttcatcaagctgtgcctgaatatacgccagattgtgactcacttcttcgtagcgttttttcatcggcagtttgaggttgaaaatggtttcacggcaccagccattaaccagccactgtgccatcaatgccgcaactttcgccggtttttcaaccatatcgcataccatccaggagatattgctgcgcgtcggacggaatttgaaaccgtcttcccgcagccacgtcacctgtccggtatccatcagactttgcgccatcgggccgttgtcgacggaataaacccacatgttgcgcttcaccagttggtaggtccagccgccagggcaagcgcctaaatccaccgcccacatcccgttcgccaggcgttcatcccactcatccgcaggaataaacacatgaaatgcctcttccagtttgagcgtggaacgactcggcgcatctgccggaaatttcaggcgcggaatgcccatatagaacgggctattattgttgctgtaactgtaaccggtatagcagcagcctggtgcaataaagaatacatgcacaaccggacgcttcggcgtttcatagttcgccagcaccccggcatcgcgcaaggcagcgcgtagcggaacagtaaatttacggcagaatttcagtaactctttgctttcgttggtatcggcaacttcaacacgcagttcaccgcccttctctactacgccctgtaacatgccgacaatgggggtaatacgatcttctggcggcaaatgctgcaggagttcccccaccacaaaccactggcgggcaaaaattaaactactgaacggcagctcacggattaacttatcgccatcatcaggttgataacattcataaatgacataacccgcattctctttcacgcgggcaaaaccgaaaatttcccgctggccggctttatcggtaatttctgcggcgcactctttttcaaagcccggacggcacagcaatacaaccttattcatgacttacgcccttgcgctttaaacggatagcaccaactaacattaacgcccagcccgcgaggaagctcacgccgccaaccggagtgacaaacgcccacaaacgcagatgggacagcgccaggcaataaaggctgccgctgaacaacaccgtgcctaacgcgaggaaaacgctactccagtaaaaccagatactgatgcgacgctgcattgccaccgccagacctaagatcgccagcgtatgaaacgcctggtattcgaggccggtctggatccagcccatctcaacggcccccatggttttacttaacacatgcgcgccaaaagcgcccagagccacaaaaatgaagccgctaatggcggcgaaaatcagcataaaacggctggtcatggtcgtaccctacgtaaattattgttcataacgaaagcggaatttttcttgttcagcagcggctttcgccaggatccattggcgaaaggcggctattttacccagttctgcctgactgtcatgacaaaccagataaaaagcatttttactgaccagaacatcattaaacgggcaaacaagacgtccggcctcgatttcagattgcgccatcacgttatttgccagcgccactccctgcccgtggatagccgcttgcagcaccatggcgctatggctaaaaattggcccttgctgaacgttgatatgatttaaccccaactgtcgggtatatgtctgccagtcacggcggctagcatcatgtaataacgtatgtttagccagatcttccggtgtcttcaagggtttttcgccagtcagcagtagcgggctacacaccggcaataaatattcggcgtacagtttttccacccgtagccccggccagttgccccgaccataaaatatcgccacatcaacatcatccgccagcttatcttcctgacgatcaaccgcctggattcgaacgtcaattcccggataagcactattaaagctggaaagtcgcggaaccaaccaatgaatggcgaaactggggagtaaactgaccgtcaacgcccccttggcgctacgggcctggagtttacgcgtcgcttcggttaattggctaaatatctctttgatatcgaggaaatagctttgcccttcctcggtcagcaggagactacgattacggcggcggaacagttttagccccaaaaaatcctcaagagacttgatttgatgacttactgcggcttgggtcacaaaaagctcttctgctgcgcgagtgaaacttaaatggcgtgctgcggcatcaaaaactcgtaaggcatttagcggtggtaatcgtttagacatggctattaaactttgatgttaaatgaatttaacaattagatcacactatgtaacctattagtttttttaatctgagccattataaattgtccgttgagcttctaccagcaaatacctatagtggcggcacttcctgagccggaacgaaaagttttatcggaatgcgtgttctggtgaacttttggcttacggttgtgatgttgtgttgttgtgtttgcaattggtctgcgattcagaccatggtagcaaagctaccttttttcacttcctgtacatttaccctgtctgtccatagtgattaatgtagcaccgcctaattgcggtgcttttttttaccttgcgatcgcgaattactgatccagttcgaccatctctttcacgtcagtacggttgatctgctgtttgttgccattagcgtctttatagctaatcataccggtatcgttatcagtctgtggtttgccgtcagagacgatggtacgtccgtcattggtgtgcatcacatagttgctaccggaacaggcgctcagggcaaaagtcagcatacaggcagaaataattgcggcagtctttttcatcatcttctccttaaagcgattaataaatcttaatagtattgattaacaggctaaaattaacgcctaacactattcagcatatgttacttacgcggcttcgccaggatatccagataattctgatggttagcactctccttgtatcaaagtgaattttgcgtcacgatcggtgcatcaagccgaggagtaccatgaacgtttttaatcccgcgcagtttcgcgcccagtttcccgcactacaggatgcgggcgtctatctcgacagcgccgcgaccgcgcttaaacctgaagccgtggttgaagccacccaacagttttacagtctgagcgccggaaacgtccatcgcagccagtttgccgaagcccaacgcctgaccgcgcgttatgaagctgcacgagagaaagtggcgcaattactgaatgcaccggatgataaaactatcgtctggacgcgcggcaccactgaatccatcaacatggtggcacaatgctatgcgcgtccgcgtctgcaaccgggcgatgagattattgtcagcgtggcagaacaccacgccaacctcgtcccctggctgatggtcgcccaacaaactggagccaaagtggtgaaattgccgcttaatgcgcagcgactgccggatgtcgatttgttgccagaactgattactccccgtagtcggattctggcgttgggtcagatgagcaacgttactggcggttgcccggatctggcgcgagcgattacctttgctcatagtgccgggatggtggtgatggttgatggtgctcagggggcagtgcatttccccgcggatgttcagcaactggatattgatttctatgcttttagtggtcacaaactgtatggcccgacaggtatcggcgtgctgtatggtaaaagtgaactgctggaggcgatgagcccctggctgggcggcggcaaaatggttcacgaagtgagttttgacggcttcacgactcaatctgcgccgtggaaactggaagctggaacgccaaatgtcgctggtgtcataggattaagcgcggcgctggaatggctggcagattacgatatcaaccaggccgaaagctggagccgtagcttagcaacgctggcggaagatgcgctggcgaaacgtcccggctttcgtagtttccgctgccaggattccagcctgctggcctttgattttgctggcgttcatcatagcgatatggtgacgctgctggcggagtacggtattgccctgcgggccgggcagcattgcgctcagccgctactggcagaattaggcgtaaccggcacactgcgcgcctcttttgcgccatataatacaaagagtgatgtggatgcgctggtgaatgccgttgaccgcgcgctggaattattggtggattaatgacaaacccgcaattcgccggacatccgttcggcacaaccgtaaccgcagaaacgttacgcaataccttcgcaccgttgacgcaatgggaagataaatatcgccagttgatcatgctggggaaacagcttccggcattgccagacgagttaaaagcgcaggctaaagagattgccggatgcgaaaaccgcgtctggctgggatatacagtggctgaaaacggcaaaatgcatttctttggcgacagcgaagggcgcattgtgcgcggcctgctggcggtgttgttgactgccgttgaggggaaaaccgccgccgagttgcaggcacagagtccactggcattgtttgatgagctgggattacgtgcgcagcttagcgccagtcgcagccaggggttaaatgcgttaagcgaggcgattatcgctgcgacgaagcaggtttaagcacagaaccgggtcggataagacgttcgcgtctcatccgacctgattgtttaaccctgacgcgccgctttcgccatcatcttcttcagcgcatgagaaaccgcaacaaacccaaaggtggcggtcaccatcgttgccgcgccaaatccagatgcacaatccatccgcttcggcccttctgccgtggctttcatcgcacacaccgtaccgtcactctgcgggtacaccagcgcttcagtagaaaacacgcaatccacgccgagcttacctttactgtttttcactacgccaaaatcgcttttcaggcgctcgcgcaacttcgccgccagcgggtcctgaatcgttttcgccagatcggtaacctgaatctgcgtcggatcaatctgcccacccgcgccaccggttgtgaccagtgggattttattgcgccgacaataagcaatcagcgccgctttgggccgtacactatcaatggcatcaatcacgtagctataacccacgctcatatactgcgctacgttatccggcgtcacgaaatcatccaccaccgttacacggcactccgggttaatctggcgaatacgctccgccataacttccgcttttgccagcccaacgttatcgcgcagggcatgaatttgccgattggtattggtgacgcacacatcatccatatcgataagcgtgattgcgccaatccccgtgcgcgccagcgcttccgccgcccaggaaccgacaccaccgataccaaccacacaaatatgcgcgtcagcaaacagttgcaacgctttttcaccatacagacgcgctgtgccaccaaaacgctgacgccatgcatcactaattaccacagacatagcacctcagaattaaaaagggcgaggttatccctcaccctaaacgcataaatgcctgatgcgctacgcttatcaggcctacataactcctgcaatattttggatttgcatgatttgtaggccggataaggcgttcacgccgcatccggcatgaacaacgcgcacttagtcaataatcaggatgtgaggttacccctcaccctgtcatatccgtaaaaacggcatacagaatatcacatcagccgctaaagacgttacctgcgcccggggcggttttcagcacccagacacgtccatagtggttgtaccaacctgcgcggtgtccggcttccggcccgatcccttgatagatatcgaagtgttggcctttgattgcaccaccgacatccagcgccaccatcagacgcagttcgtactgaccattaaatttgccgttattatccagcaacggcacttctgccagcaaggtagtacctggcggaataatggaacgatcagaggcaacactcgcgcgaccaaccagcggcaccgcacttgcccctttcaccggagcaaaagattgcggtttaaagaagacgaaagacgggttctgttccagcagctcgcgaacctcggcttcactgtgtgtttcgccccagtgacgaatcgcctgcatgctcatatcttcttttttcacttcgccacggtcgatcagcaccttaccaatgctgcgataggcatgaccgtttttccctgcatagctgaaaaagttaagcggactgccatcaccaaagtcgatatacccactaccctgcacatccataatgaagttatccatcagggagttactgtaagcgagaatatatttatcactcaatgcccccgcgtagatctccgcacgagacggcagacgaccacgttttggcggcatacggtaaataggatactggaactcgccctggcgggtatggcgcgcctgaattaccggcgtgtaataaccggtaaactgcacgttaccatagttgtcggcaccttccatctgccaggcatcaatgccgaactggcgcatattgcgggtatcaccgcctgcgcgcagccactcttgcaccgcgttataaacattactctggttgccatacagacgcggactgctattacggatatggttaatttgctcggcaaaatcaccggcgttaatcggcgcgccaacggcatctggctggttcaccagagagaaaggctgggtaaatttcccgtctttatattgctgtccgcgatcggttggtttggaagagcaggcggcaagcattgccacaaccgtgcccataagaaggtactttacccaacgtcctttcattgttctcttcttcaggttaaaaaataaggcgcaacgaagataacaaaccgccgcgtttaatgaaatgagcagcctctccctgacgcaaattttgcacaaaaaataggctttagtgatttgtttttgttcaaaatcatgccaaatccgtgatcggggtaaaaaaaaggttgcatgaaaacgcgagcggagtatagtgcgcatccacggacgcggggtggagcagcctggtagctcgtcgggctcataacccgaaggtcgtcggttcaaatccggcccccgcaaccaattaaaatttgatgaagtaaagcagtacggtgacgcggggtggagcagcctggtagctcgtcgggctcataacccgaaggtcgtcggttcaaatccggcccccgcaaccaatcaaatttgatgaagtaaaagcagtacggtgacgcggggtggagcagcctggtagctcgtcgggctcataacccgaaggtcgtcggttcaaatccggcccccgcaaccaattattgaacaccctaacgggtgtttttttgtttctggtctcccataaaaaagcgccattcagcgcctttttatcatccccttctcgccagcgtcgccccatcggcaaaatacgctttaatccccgcaagaatagactccgcaacttcctgctggaaagtcgccgttttcagtttacgctcttcctcaacgttactgataaacgccgtttcgaccagaatggagggaatatctggtgcctttagtacggcaaacccggcctgttcaacttgatttttatgcagcttattgattttaccgagcttattcagtaccgctttaccaaacttcaggctgtcggcaatggtcaggctctgtaccatatcgaacatggtgtggtcgacatagcggtcaccgcttttgctcacgccaccaatcaagtcgctggcgttctgggtttgtgccagatattttgccgcagtactggttgcacctttggtactgagcgcaaacacagaggaaccgctcggctgacgactggtaaaggcgtcggcatggatagagacaaacaggtcagcacgctgtttctgggcttttgctacgcgcacttgcaatggaatgaagatgtcttcattgcgcgtcatgtacaccttcatattgccctctttctcgatcagagagcgcaaacggcgagctatttgcaataccacatctttttcgcgcgttttgtatttccccaccgcaccggagtcttcgccaccgtggccagggtcaagcataatgacaatcggacgatcgcgccctgctttacccggttgtggaccactttgcgctggcggcacctgcttttcgaggtcgcctttgttgtaatcctccagcagcgccagcagcgggtcctgcatatcctgtgcattggccggatagaggtccatcaccagacgctctttaaacccggcgaccggcgcaagggcaaacagctgcggttttacgttttgctttaattcaaaaaccatccgtacggtttgcgggtcaaattgcccgacgcgcgcgctcttgatgaacgggtcgtctgcacgaatttgtgccgccatccccttgagtacgctgttcaggtttacatcttcgatatccaccaccacgcgttcagggttactcaacgcgaactgcttatatttcagctgacgattactttccaccgtcacgcgggtgtagctggacgcaggccagacgcgcaccgccacgacctggctgaccgcagccagactgacctgacttacgctcaatagccacatggcacccgcgccttgcagtaaacgacgacggctgattgcagtgttggatccactcatgcctctcccgagcaaaagaaatctaagctgtgtaacaagtaaacgactaatttgaccggaaactttagcgaaagacgcataatctgtcatctaataaacggtaaacattctttttatattcacggcattactgataaaaaagtcgctctcgcataaaatttacacttgcaccctgcgaaaaaacagaataaaaatacactaatttcgaataatcatgcaaagaggtgtgccgtggtaaaggaacgtaaaaccgagttggtcgagggattccgccatagcgttccctatatcaatacccaccggggaaaaacgtttgtcatcatgctcggcggtgaagccattgagcatgagaatttctccagtatcgttaatgatatcgggttgttgcacagcctcggcatccgtctggtggtggtctatggcgcacgtccgcagatcgacgcaaatctggctgcgcatcaccacgaaccgctgtatcacaagaatatacgtgtgaccgacgccaaaacactggaactggtgaagcaggctgcgggaacattgcaactggatattactgctcgcctgagcatgagtctcaataacacgccgctgcagggcgcgcatatcaacgtcgtcagtggcaattttattattgcccagccgctgggcgtcgatgacggcgtggattactgccatagcgggcgtatccggcggattgatgaagacgcgatccatcgtcaactggacagcggtgcaatagtgctaatggggccggtcgctgttagtgtcactggcgagagctttaacctgaccagcgaagagattgccactcaactggccatcaaactgaaagctgaaaagatgattggtttttgctcttcccagggcgtcactaatgacgacggtgatattgtctccgaacttttccctaacgaagcgcaagcgcgggtagaagcccaggaagagaaaggcgattacaactccggtacggtgcgctttttgcgtggcgcagtgaaagcctgccgcagcggcgtgcgtcgctgtcatttaatcagttatcaggaagatggcgcgctgttgcaagagttgttcagtcgcgacggtatcggtacgcagattgtgatggaaagcgccgagcagattcgtcgcgcaacaatcaacgatattggcggtattctggagttgattcgcccactggagcagcaaggtattctggtacgccgttctcgcgagcagctggagatggaaatcgacaaattcaccattattcagcgcgataacacgactattgcctgcgccgcgctctatccgttcccggaagagaagattggggaaatggcctgtgtggcagttcacccggattaccgcagtagtagtaggggtgaagttctgctggaacgcattgccgctcaggcgaagcagagcggcttaagcaaattgtttgtgctgaccacgcgcagtattcactggttccaggaacgtggatttaccccagtggatattgatttactgcccgagagcaaaaagcagttgtacaactaccagcgtaaatccaaagtgttgatggcggatttagggtaagcgatgaaaatcgtcggatgcgacatgcgtaacactcgtacgtcgcatccggcaattacgtttattcccgactactaaacaacgccgccagaccactgcgccgctcagtacgagtggcgattgccgcacttaatatgcgctcatcggcatacaggctcagacggcgacgcgcgcgggtcaccgcggtataaaccagctctcgcgttactaccggcgtgcgttggctcggcaaaatcaacgccgcatggtcgaactcgcttccctggcttttatgtaccgtcatcgcccacgtagtttcgtgctctggcaagcgactcggttgcacagacttaatattgccgtccggcatcgcaaaccagacgcgcgtcccctgcccgcgatccagcgcaataccgatatcgccattaaacaacccaagcgcgctgtcattacgggcaatcatcaccggtcgaccttcgtaccaacgagagtgcggatgacgatgaattttgcgcttctgttgcataaactgctcaattcgctcattcagtccagccacgccaaacggcccttcccgcagggcgcacaaaagctggtactcattgaacgcctgaatgattaaatccggctcggcacgcgcttgcagcagatccagataacgtccgtaacccgcaagagcttcctcaagcatcgcaatataatcttcgccgctctgtaaaagccgtttttcgatatcagtaaaatcctgctgaaaaacggttttcactgccgttttatcaccacggttgatcgccgcagctaactgaccaatgccagaatcgctgccgaaacgatagcttttttgcagcaggcagagactgtcgcgcaaagatgccgcttctgtgccggttcctgccggaacgtgagtccccgtcaggcggcttagctgcctggcacgctcggcggtaaagcccgcgttggcataagcgcagatatcgcccagcacagccccagcctcaacgctggccagttgatcacgatcgccgagaaagatcactcgcgcatgatcgggcaaggcgtcgatcagtctgctcatcataggcagatcgatcatactcgcttcatctaccaccagcacatcaagatgcagcgggttaccggcatgatgacgtaaacgctggctacccggctgcgcgcccagcaatcggtgcaaagtgctggtatcttccggaatgcgtttcttttgttcatcggtcagcggtaactgtcgcaaagccttgccgagagattcggttaagcgcgcggcagctttacccgttggtgcagccagacggatacggcagcgttcgccgtcggccatttgaattaacgctgccagcaacttcgctacggtggtcgttttaccggtgccagggccgccggaaatcacgctgatccgccgcgtcagcgccactgccgccgcaactttttgccagttaatttcatcgcttactggaaaaagtttgtccagggtttgcgccagtagagcttcatcaacctcaatggcatgattcacttcgttgaaaaagcgtgccactgtgcgctcgttacaccacatgcgattcaaataaagacgatcgccacagaggatcatcggcgtgggttcatctcccctgctgaccgcttgagaagccagcaagcattcttcccaattttgtagctcaccgatttcactgacacaggtcgccaacagcggatggctcgcctcgttattttccagtcgactaagcggcaaacaaacgtgtccctctccggcatcatgacttaacagtgccgccgcgagggtgacggcaggatgttcatctcccgccacggtcagggcaaattgcacatccagcgggcgtagctgtttgtgctccacagcttccagtaattgcttttgcaatttcattacgcctcctccagggtcataccggcaaacatctcatccatcagggcaatcaacccggcgttgggtcgggttgtgtaaatcccctgttgcggatgttctttatcaacgccacgcaggaacagataaataacgccgccaaagtggtgctcatagtcgtaatcagcaatgcgatggcgcagataacgatgcagcgccagggtataaagctgatattgcagatcatagcggtgtgcctgcattgccgctgccatagcctgttgggtgtaagcgctactgtcttcacccaaccagttggatttatagtcgagcaggtaataacgcccttcgtggcggaacaccaggtcgataaagccttttaacatgccacgtacctgcatgaactccagcggcgggcagcctgcggatagcgggtcaaactggcggattaacgtatcaagctgactggcgataagcggttcactaatcggcagataaaactccatctccacctgtttattgcgggcggaaagttgactcaggcttacgccggtttcattgagaggtgcctggaggacagccgtgatccactcggtcaataccggttcccactggctttcaaagccgccgagttccagtttttcccgcacccagttcgggtcaaccggctgggtaaaatccaggtcttcaaacaaactgtgcaagaacgtccccggactcgcaccgcgcggaaactgatgtggtgttaacgtcggttcttcaacgacgctggcaacgcctgcagcatcgacatccagccgaggcatcaaatcctgggcgataccgtgaccacgctgttgcaaaccagagtagctggtgacgcgccagttatcgccgggcaatcgttgtaacgtcttcgcattcagctctgctgtagaaacatcattaacctgccagggttggttatcaccagtttgtgccgtttgccaggcaatatcatcatcgcataacgcttcaatacaggtgcgaagccctgccgcatcttgcggttcccctttttgcagcaaacgcccgagcgcactttggtggacgtcggtgtcaccttttttatcgccacgacggcgcaccagcggtgcaacgccgagactgcaatgccaaacgctacgtgtcagcgccacgtaaagcaaacgcagatcttccgccagacgttcggcctccgcgaggtcgacgctttctggcgcagcattaagatccagaactgcctcaaagctgtggcgatcgtgataaaacgcctgctcctggacgcggaaattggtgataaacggcagccagaccaatggatattccagccctttgcttttgtggatcgtgacaatctgcaccagatgtttatcactttcgagacgcatttgttggctggaggcattactgtctggctcgaggatatgttggcttaaccagcgtaccagcgcatgttcactttccagctgcgttccggcttcttgtagcagttcgctgatatgcaagatatcggtaagacgccgctcaccgcctgccgttgccagcaagttttcagcaatgttacgcgcgctcatcagcgcccgcagcatcggcataacgccacgtttgcgccagatttgccgataaccatcgaactcttcgactaccacatcccacgcatgttcgtcattgttcagcgtttcgatatccagcgcgttcagccccatcatactcgttgccagcgcactacgcagggtgttctcacgttcgggcgtcatcaccgcctgcaacaaccaaagcatttcctgcgcttccagagtttcaaaaacactgtcgcggttgctaaggtaaacggaagggatttccagcaacgttaaggcatcgcgcacctgggcggcctcctggcggctgcgcaccagcacactgatgtcgctagcacgcaccggacgcgcgtcgtcgccgttcatcagcaacgcttcgccccgctgtccggcttgtagccagtcgcggatttgcgcagcacatacctgcgccatggtactttgataatcgccaacgccgcagctttcgccttccatcagccacattttcatcgcaggctgtgtttcacctttaaatacaaaacgtaacgcctgatttttcccggcacttttcactggaataaacggtatttcgcgaaacatgaacgcgtcatcagtctggctgaaaagcttattcacgctgttcaccattcctggtgcggaacgccagttggtgtctaaagtgtagtgggcgtgaacttcgctacgcgccttcatataagtgaagatatccgcaccccggaatgcatatatggcctgcttcgggtcgccaattagcaacaatgcggtttccggctgatggtgccagatacggcgaaaaattcggtactgctgggggtcggtatcctgaaattcatcgatcattgccaccgggaatcgcgtacggatcgccgctgccaacacctcaccgctttcgctacgcagcgcggaatcgagccgacttaacatgtcatcaaaacccaattcgccacggcggcgtttttcacgcgctactgtttcgcggatctcagccaatgcgcgggtgatcaccagatcgcggatgctcaatggttctgcaagcagttgatcgatcgcctcaaacagtggatgtcgcggggtttcccccccggccttcgtgcgatcttctaagaaacgctgggagaatttttccaggctctccggcaactgataactgtttgtctcttcttctgcccaggcgctgatcttgtcgatccatttagcctgattgctacggttaaacttgcgtcgatcaataccagaagattcgatcagcgcatccagttcacccactgcgtcgcgccactgctgttttaccgtatcaatacgcgccacaatttgcgcgtgacgggaagccagcgtttcatcatcgggcggcggtgctttgataaccggcgcttcgccttgcagataacgattaatatcgcgcagcaacgcctgcggccctttccaggtttcaaagacgacctgggctatttcacgcggcagcgggtagcagtggcgacgccagaaatcggcgcaggcctggtagcgtagcagagactcatcttcaatcagctgctgctcaaacagcatgccggattcaaaggcattcaggttgagcatgcgctggcaaaagccgtgaatagtaaagactgccgcttcatccatctgccgttcggctaacaacaaccactgcgcggcttgcgctttatcgtcgatctcttccagcaggcgttcgtacagtggattgtcggtggtttcacgcagacaggcgatgcgcaactcgtggatattgctacggatacgaccgcgcaattctgccgtggcagcctcggtaaaggtgaccaccagcagttcttcaacggtcagcgggcggggaaaggcggcggaaccgcctagtccaagtaacaggcgcaaatagagcgccgcaatcgtaaaggttttgcctgtgccggcagaggcttcaatcaggcgctcaccctgtaagggcaagcgcaaaggatctagtgtctcggcgacatcactcattcttttcactcatcaggggcattgtttgctgcaacgcgctgacgttctcccacactttccagccttcagggtgtacatattcggctttcccgttctggctgccggaaatctggctcagaatagccatgccttgcggctcgaccaccgcctgatggaagaaatcagcaagtttttgcggcgtcagcagttttatctgggccacgattttatcacggctatcgaagcgcatattgccgcgatcgaaatctttacttaacttgcttgcttcttcgccgagcgtttgcggtgcctgcagcatctgggtaattaccgcctgctggatttgcgcaaactcatctggcttcatcgctcgcaattttgcctctgcggttgggaaaaacgccttgtaacgctcccacaagaaactaggctgtttatcattgctttgcaaaaggaagcccatgccccactgacgccccacgctcattggaaacgcaaacacggcatagcccaattgttcttcggtacgcaactgattgtagaaccacggctgtacgatctgccccaacagagagctataggcactgctggtgtattcatcgtagccagtcggtacaaataccgctgccagtgcggagtcggtgctgttaccggctttttcaaagatgacggattgttttttatcgaccactacatctttgtttcgacaccactcactaccatcagcgcccaactgtttttgcacatcgcgtgccagcgttgttgcctgggcctcggtcatgttgccgataaccataaactctggtcgagccccactttttaaggcgtcgcgataggccagcacctctttcaacgtaatggagggcaaaattttacgccgttcatctcggctgaagtacggcacttggctgagcatctgcgcgggcataatcgcctgctcaaacgctttacccttttctgcggaatccatcatctggttataccaggacttcgcctgctcaagctgatcttccgtagcggtatagctaaagtacccctcgagcaatgcctggaacagctgcggcagacgctgggtgtaaccattagcattaaccataaggccgttgttagcgttggtggaaaaacttatgccaccaacgctcgcctggttgcttaactgatcaagcgccagccctgcgagataatcattgagcgcaaacatcacctgattgcgggcgctgtccatggctttcggattacgcaaaatcaggctgacatcagctttgggctcgctggcaaaataacggcttggcgcatacaccacgcgcagattgctctcatcaacaatcagctctggatggtcgtatttcttctcactcttaatcaggctgaaatcatcaggaatataagggttaagctctggcaaagagagcgcaatgtcggcggcttttttctgccagtcggcgaaagtttgtgcgctgattttatcgacctgatacggcgcatcgacaaagtaagccgttttgttgtgcggctctttcgggctgatataccagatacgcgcattctgcggcgtcatcatcgccagacgttcctttactgctttagcatcgtaccgatcggcaatattgactgcatccagcgtatgctcaacaggaacgcgaatcatggtatctgccagccattcgacgtaatccatatcacgggtgatgctcggataacggaagtcgatatccagcacattcgccagttcatcgaagtattgtttatcaatgcctttttcacgtaacagattgagatagctaaaaattgccgccacaacctgatcgcgattagccaggcctttatcggttaaagacgcagagatcgctaatacgccgctgttgccgttgacgataggatcggagttggcgctaatgccctcaactaatccctgcttttgcagccagtcagaaagtgtacctgggctgcgattgccaatcagataggtaatcaattcatcggttttactacggaacttcgcactgttgttatcgatgcgaaactcaacgcgcaacactttacgcggcagcgcagggacgtaatgaatgataatgcccttttgcgcgtcggtgactaccggcacggtgatttccggttttttgctctctttgttcggcacgcgaccaaaggtgtccgccgccatttttgccaactccggcagcggtttattactgtaaataaccgccttcatcaaattggcggaatagtacttctcgtggaaatctttcagcgcctgctgcaccggattaccaggtttgtcgcttaaagtttcgaggttaccaccagaaaacttactaccggggtgtgccgggttaatggtttctgcgctgacctgtgccatgcgcatcccgtcacgcgtacgcgccatggttaattcagcgttcaccgcattacgctcacgttcggcatatttcttgtcgagcaaaggttcagcaatagcatcggccaggcggtctaccgcaccaggcaaggcgtcgttctcaacttccagatagaaagccgtgcgatacggcgcagtgctggcattgtgactaccgccgtgcattttgagatattcggccagactgtcagcctgcgggtactttttgctccccatcagactcatatgttcaaggtaatgtgccagcccctggtacgcctcgggatcttccaggctcccaacgggcaccaccagcgcgctgaggcttttaactgcctgcggatcagaaaccagcaagaccaccataccgttatccagacgtatagcctgatactggcggttatctttatcacttttacggatggtttcctgaatcggctgccatcccgtttctgcctgacttaagggtgcccaaagggcaactaacaacaataatgctttgaaccaggtgctgcggggcattcacggacctcataatcaacttaattttctgtccagattcaacacgttaacgcaaatcatctgccagaatttaatcttgtgctgcacgagtcagcctatgtttatataaccatcagtccgtgactggtgcgcatcataaagtaagcggatagattgcgcaatttttatacagcactcaactctgattaaagcgaaacagcggtaacaggaaacgttggctctgttcaacgatggcctccattgtctctggtgttaattgccgccagagcctttgataccagatatcatcaccttcgccacgcaccatcatgttgccttcgtaagcctgaaggaatttcgtacgggctttttgcaacgtggaatcgtcatccagcatggcatcgttttgcgcgtcataacaggtttttagccacgcgccgccactttcaggtaacaccagcaatggcgcggacattccttcacgatacccctcaatcagttgactgaggtaatgcaaagcctgttcggctgcaagcggcggaaaacgccactcgccgtctttgcgtagaaaaaggcgactttcaccattaccaccgctggcacagtagacaaggtgttccagccaaagttgcattccctgggccacacttaataaagagggacgccagcgcaacaggccatccggctgcacctgcggcaaccagccagttatctgcacaccgttgcaggcgagatcaatttccatactctgccccggctggcgacaggcaatgactctgtcggcaagctgctgcatctcctggcactgtgtttcccagaaaatttcaccaaaagcgccatacggtaaatcccctgccgctcggaagcggcggaacaagcgttcggcatcatcctgctcaaccagtgcattcaataactgctgattgatttgataacggctaagtccttccagaataaatggctcggtgtcggggatttcgctgtcttcagtacggaagttcacctgcaaacgcatctggaaaaatgcccgcaccggatgtgcccagaatcgttgtagcgtttccagcggcacggtttccggtaaggtaaacggcagcggctgaacaaattcagaatgtgctttaccagcctggctggccgcaggtagccattcacgagcatagctttgtcgttcgcctggctggtagttttgtggatcaaacggcatccgggtatggaggcaagtaagatgcgcttttacccttgcctcgctttcatcacagttgagcgcttcatcgcccggtagataatgactttgcccgatgtagtcgatcagttcctgcaccagtacgctcgggaaacgctcactgttatcctgaatggaacgaccgatatagctgatatagagtttttgctgcgcggaaattaacgcttccaggaacagatagcggtcgtcatcgcgacggctacggtcgccacgcttcggtttctggctcatcaggtcaaagcccaatggcgcaagctgacgtggataaacgccgtcgttcattcccagcaggcaaaccactttgaacggaatactacgcattggcatcagagtacaaatgttaaccggtccggcgagaaaacgctggctgatacgttcttgatccagacgctgtgccagttcatcacgcaatagactcagcggcaccgcgtcgccatactgcgcacctaaaccttcggcgataatcgcctgccattgttgttcgatcagcgtcatcgccgcttcggtttccgcatccggcaggaagaaggcgttgagcatatcgcgacaaaccggcaaccactcttccagcggacgctcctgtgccagcccgcgacgccagatgtttagctgcattagcagactagccagatgccccaccagttctgcaattaagccgctgctttcatcataaggtagaacgctttgccactcgccctgcgcgctctccatcgcgtagcccaacaacatacgcgtcaggccaaatcgccaggtgtgttgtccggtggcggggagttccagctcgcgaacgttgtcgtcatctatgccccaacgaatgccggattcgttgacccactggcgtaaataacgcagcccttcttcggtgatgtcaaaccgcgccgccagcaccggcacatccagcaacgccagcacatcctcactcacaaaacgactgtcaggcagacttaacaggctgataaacgcttccagtaccggatgactctgccgcgcacgacggtcggaaatggcgtaaggtaggtaacgatccgcaggtgcgctaccaaacacagcctgaataaacggactgtagctgtcgatatcagccaccatcacgatgatgtcgcgcggagtaagtgtcgggtcttcctccagcatcgccagcaggcgatcgtgtaaaacttcaacttcacgctgcgggctatggcaaacgtggaaggtgatactgctatccagtggatcaagcgggcgtttgttatcgctacgggaaaactcttcgatgttcacaccagcaacggcgcggttttccagttccagaatgtcagactgaatgttatgcagcaggttatctggcgtgacatcgacaaaggcgtccagctcctggctgctctccaggtcagaaaggagataaatgtagtcgcgcccaagcttaccccaactagccagcagcgggttgccgacatcctgttcaccatcgctgttaaagagctgcccggcattttcgctatcacgaaatagcggcaattcgcgatcttcaaaactgtgtcgacgctgacgggtcagcagtttcgccagataagcaggatctttaatatcgccccagtaataacggcaggggttggtaaacaggagatggatttcaatatgtttacccagcgcctgtagcgcctggagataaacaggcggtaacgcggaaataccgcatataaagacgcggctaggtaaccccggcgggcaggtcgtcgcggactccagcgtttcgataaagcgctgatagagattggcgcggtgccagcgcggttgcccgagttgatgggtatattccaccagcgccttccacaacggggcttgccaggcctgtgcttctcccagcccttcaaccaaatgtcctgtttcccactgtgccagccagtccggacgatagaccagatactggtcaaacaggtccgccgctttactggaaagctggaacagttttcgcttgtcgctatcgtcagtcagataatgccgcaacagggtaaagtcttcgcgctccagcaattgcggcagcagagtcatcagtttccagctcatgctctgtttgttaaaggcgctctctttggggatttccggtaacacccggacgaacatatcccagataaagctcgctggcagcggaaaatcaatgtttgccgcaataccaaacttttggctcagggtcatttgcagccactgtgccataccggtactttgcaccagaatcatctctggttcgaaaggatcgtccagccgttcgcgttcgacaataaactccatcaacgcttccagcacgtccagacgattggaatggtagacccttaacatagcggctcctgattactgacgattcgggcaatgcaggcgggtcatctcgccttctctgcccccgggactaactagcgtaacgctgatgctgacacatcccgcctggcttgtctgcattcggttgacctgccagttggcaggtgggctaatcgcgcgcagttgcgtttgctgccagccatgccgccagagctgttggtactggtttctgctggcaagactgttcattaatgttcgctggaaaccgcttaacgcagtgacaatcatcaccatcaacaccatcgccaacattacctccggcaggctaaagccttgttgattcttcagggaagcactcataacgccctctctttcagcggttaaatcagggaagctgacataacgccctctctttcagcggacaaaaatcgctccagccgcgtgggctaaaaacaatgtttccatcaatgacttcgcctgttcgccacaagctaacgccttcataaccggcaatcaataaggcttcattatctgccagtaaacgcaaacaaacctgggcatcggtttcagcgtactggctgcactgaactgctggctgcgtctgccagcagtgcatttttccccacgccagcgcgctctgaacgatggcctggcggcgcaaactctgactttccatgctcacgcgagaggcaaaactgcgatcctgttggctcattccttgtaatagcaaactacccaaaaccagcagcatcaggaccagagccagactgctaacacccttttcgcggttcacaggttgaatcctgtcacgctatagctggcattcaccacggtttgcggttcagacttactggcagcacgcatattaaccgtcaacaccgggctgaagccgctgacatcctgacgtacgacctgaaaagtgtcgataatgatggcatccggattagtgactttatcccagcccttaccttcacaggatgtcgcaccgcgtagcgtttccagcacatgctccttcagacgaaatccaatctggtcggactcttttaccggttcgcgatcccagataccgttactgttcgcatcccactgcacaatgacacagtcaccctgtccgacaatttccagcccttcgccggtacagatgccatgacaataacccgccctctggagatgcttcgcgacggtaaatacccgcagccagatttcatcttccagcgccagcttacgggtgctcgttaaactttcacgctgtaacgcaggcagaaagcgtgccgcccccagcaacaatacgccactgatcgccatagcaatcaacacttccagcagagaaaaaccttgctcttttacaggcatccttctgtttctccttgctgacaaagccggagtcttccccacgggctaaccaccagccaccactcgcccgtactgtttttgaagcgaatatgcccggcccatgcggtattgcgcaggccaaagaaagcaaggctaggtgtcaggtcgctcatttcgacttcgggccagcgtggcacaaagaccaatggactactgccatgacaggtattggccccagcagcggaactcacaaggcaccataacgtcccctccctgataacgctgatactgtggtcgcggttatgccagttggcatcttcacgtaaatagagcaaatagtcccgcgcctggctggcggtttgccatagccgttggctctgctgccagtattgccagccatagagtccacttgcgcttagcatgaccaaaatcagcatcgcgaccagcgtttcaatcagcgtataaccacgttgtgttttcatgccggcagtatggagcgaggagaaaaaaagacgagggccagtttctatttcttcggcgcatcttccggactatttacgccgttgcaggacgttgcaaaatttcgggaaggcgtctcgaagaatttaacggagggtaaaaaaaccgacgcacactggcgtcggctctggcaggatgtttcgtaattagatagccaccggcgctttaatgcccggatgcggatcgtagccttcaatctcaaagtcttcgaaacggtagtcgaagatggattcgggtttacgtttgataatcaacttcggcagcggacgcggttcgcggcttaattgcagatgagtttgatccatatggttgctgtacagatgcgtgtcgccaccggtccagacaaaatcacccacttccagatcgcactgctgcgccatcatatgcaccaataacgcgtagctggcaatgttgaacggcaggccgaggaagacgtcacaggagcgctgataaagctggcaagagagtttgccgtctgccacatagaactggaagaatgcatggcacggtgccagcgccattttatccagttcgcctacgttccacgcactaacaataatgcggcggctatccgggtcgtttttcagctggttcagtaccgtagtgatctggtcaatatgacgaccatctggcgttggccaggcgcgccactgtttaccatacactggcccgaggtcgccgttttcatcggcccattcgtcccagatggtgacattgttttcgtgtagataagcaatgttagtgtcgccctgcagaaaccacagcagttcatggatgatggaacgcaggtggcaacgtttagttgtcaccagcgggaatccatcttgcaggttaaaacgcatctgatgaccaaaaatggaaagcgttccggttccggtacggtcgtttttctgtgtgccttcgtcgagcactttttgcatcagttctaaatactgtttcatggttcctcaggaaacgtgttgctgtgggctgcgacgatatgcccagaccatcatgatcacacccgcgacaatcatcgggatggaaagaatttgccccatgctgatgtactgcacccaggcaccggtaaactgcgcgtcgggctggcggaaaaactcaacaatgatgcgaaacgcgccgtaaccaatcaggaacaaaccactgacagctcccattgggcgtggtttacgaatatacaggttgaggataataaacagcaccacaccttccagcagcagctcgtaaagctgacttgggtggcgcggcagcacaccgtaagtgtcgaaaatggattgccactgcgggttggtttgcagcagcaaaatatcttctgtacgggagccagggaacagcatggcaaacgggaagttcgggtcaacgcggccccacaattcaccgttaataaagttgcccagacgcccggcaccaagaccaaacggaatgagtggtgcgataaaatcagagacctggaagaaggaacgtttagtacggcgggcgaagataatcatcaccacgataacgccaatcaggccgccgtggaaagacatgccgccgtcccagacacggaacagatacagcggatcggccataaactgcgggaaattgtagaacagaacataaccaatacgtcccccgaggaagacgccgaggaagcccgcatagagtaagttttcaacttcatttttggtccagccgctgcccggacgattcgcccgtcgtgttgccagccacattgcaaaaatgaaacccaccagatacatcaggccgtaccagtgaagcgccacgggtcctatactgaaaatgaccggatcaaactccggaaaatgcagatagctactggtcatctgtcaccacaagttcttgttatttcgctgaaagagaacagcgattgaaatgcgcgccgcaggtttcaggcgctccaaaggtgcgaataatagcacaaggggacctggctggttgccggataccgttaaaagatatgtatatgatccgcgttataaccctccgcgaatcagcccgcccatgccgcgacgctccataaaggctgcaacctgatggcgaacttcggtcgccagttgcgcttccagactacgctgcgcaagattttctgcttcggcataatcaatgcgccgcagcaggtattttgcccgcgctacagaacgtccgttcatagacagatggcgatacccaagcccaatgaggattgccacgcacatgggatcgcccgccatttcaccgcacaaacggagatcgattccatgtatttccgcttcccgggcgatcatcgccagagctcgtaacattgcaggatgaagactgtcataaatgttcgccacccgggtattgttgcgatcaacggccagaatgtattgagtcagatcgttggtgccaacagagatgaaatcgacccgctttgccagatgcggcagcataaataccatactcggcacttccagcatgatgccgatacgtggtttgggaatttcgtaaccgatcatctcctcgacttcacgtccggcacgttcaatcaggcggcgtgcttcatcaacttcatcgaggcttgtgaccatcggcaacagaatattcaggttgcccgtagcggcattagcacgcagcatcgcccgcacctggatcaagaagatctccggctgatcgagcgtaatgcgaatcccacgccaacccaggcatggattctcttcgctgatcggcatgtaaggcagctgcttatctgctccgacatccagcgtacgcaaggtgacgggtttatcattgaacatttgcagcatcccctgatactgcgccacctgttcttcttcgctcgggaaaccactttgcagcatgaatgggatttcagtgcgataaagaccgatgccatcaatacggctgcccagtttttcttcatgttccgggcttaaaccagcattgagcatgacttttatacgctcaccgctttttaactgcgcgggtaaattgacgtcatcttccgccagacggctaagctcaatctcttcactaattagccgctgatattcttgcagcagtaccggctccggatcgaccagcaattcaccgcgatagccatcaacgatcagcgtcctacgatgcagcacgctaggctgaatatccgcgcccatcacggtagggatccccagcgcacgtaccatgatcgcagcatgggagttggctgcgccatctcgcacgacaacaccgactaagcgatcctggggcagctcagcaagcgttgtcgcactcagttcatctgccaccagaatgaaacgttccggccaggcgttcggcccttgattagcgtcatcaagatgaaacagcaatcgctgacccagcgcacgtaaatcgccagcccgctctttgagatagttatcacttagcgcggcaaactgttcggcaaatttttcaatgaccgtttttaccgcccactctgccacgctgcctttatcaacctcggcaaacaattcgcgacgcagccgggtgtcgctaagcaggtggctgtaaagatcgaaaatagccgccgtttctttttgtgcaccggcggcaaagcgtttgctgtagcggcgaaactcgtttgccgcttcttccagcgccccggtcagtcgttcgcgttccagagccggatccagcgtacttgcctgatacacctgttccattaaaggtaacgtggcatcctgccagccttcggcaatcgccacaccaggtgctgccggtaatgcgcggattcgcgtctggcgatattgcccaaacaaggcagtcaactggctctgagaaagaatagctgccatctgggtggcaagcgtcaccaggaaggattcttcactttcgtcatactggcgcaactctcgttgctgtaccaccagtacaccaagcaactggcgacgttgaataattggtacgcctaaaaacgcgcggaaacgttcttcttttacggaggggatgtatttgaagctggggtgcttttgcgcatctgcaaggtttatcggttccgccagcctgccaaccaggccgacgatcccttcatcaaacgcgagcgttacagtgcgaccgcgtggttttttcagcccccgggtcgccatcaggtagtaacaacgtcgatcatgatcggccaggtagacgctacagacctcggtatccatcgcaagacagatgtcggtaaccagaatatttaacgcctcattcaggcgtggtgcgctggctaccttttcgactatttcgcgcaggcgagtgagcataattggcgtgacttaacctcttttacgtcgataagcagatgcgttttgtggttttggcgtattttcctgcagactcatcaccacactcgcgaactctttcattaccctacggtagacatcacgtttaaaactcaccacctgtctgaccggataccagtaacttacccatcgccagccgtcaaactctggtgtactgctggtttgcatattgatttctgcatcgccgctcaccagctgcaagagaaaccatttttgtttttggccgatacaaaccggcttcgtgtcccaacgcaccaaacgtttcggtaatttgtagcgcaaccagttacgcgtactagcaaggattcgaacgtctttgcggcttaatcctacttcttcaaacaattcacggtacatcgcctgctctgcggattctccggggttgattccgccttgcggaaattgccaggagtgctgaccaaatcgccgggcccacattacctgcccctggcgattacaaatcacgatacctacgtttgggcggtagccatcgtcatcaatcaccggactacctcaaaataaagctttatatacgaatgattgtttcatactccaggaagacggtaaaccactctctgcagggcattacacactaataacaattgaataactcacagttatgtgcagagttataaacagaggaaggggtggatagccgtttttattcaccttttctgtggatagagttgtgaagaactacggaattactacgggaaaacccggagcattctgaataagcccgatatagacattttaaaatattcattatcagtcaatgcattacatgtaattttagtaatgaaaaagagtaattcgtgacccaggtcacacctctcatttacgggttggcgaaagatcaaccaatgccgtatttatccacagaatgtgccactaagttaagcactgaaccactaaaaactggagtttcgtcgcacgtcaaggctgtaaatggaaacagtagtggaggtttttcacagttatcccagctttctgtggataacatggtgtaagatcctgtttattttcagtgaccagatttggaaaacccgttgcagtgttgcgcaactcgattaccggcaacctaaaaagcaatataaatcagagaattgaacaacgcatgtggaaaaagttacactgcgaatattcggcacataattgctgtttgttttttaatcaaggtatcatgacatgtcccaacctcgcccactgctctctcctcccgaaactgaagaacagttgttagcgcaagcacagcaactttctggttatacattgggagaactggcggcacttgtcgggctggttacgccagagaatttaaaacgcgataaaggctggattggcgtgttactggagatctggctaggtgccagcgcagggagtaaacctgagcaagattttgctgctctgggcgtggaacttaaaactatccctgtggatagtcttggtcgtccgctggaaacaacattcgtttgtgttgccccgttaacgggcaatagcggggtgacctgggaaaccagccacgtgcgccacaaactcaaacgcgtactgtggataccggttgaaggcgagcgcagcatcccgctggcgcagcgtcgcgttggaagtccgttgctgtggagcccgaatgaagaggaagaccggcagctacgcgaagactgggaagaattaatggatatgattgttctcggtcaggttgagcggattaccgctcgtcacggggagtatttacagatacgaccgaaagcagcgaatgcgaaagcgcttaccgaagccattggtgcccggggcgaacggattctgacgctgccacgcggcttttatttgaagaagaatttcaccagtgcactactggcccgtcattttctgatccagtaaccatcgctttgacctgccgctttccgggcatataattaccgcttcatttttttggcagggctttttagatgttatttgcatggataaccgatcctaacgcctggcttgcgctcggtacgctgacgctgctggagatcgttcttgggatcgacaatattattttcctttctctggtggtggcaaagcttcccacagcacaacgtgctcatgcgcgccgtctggggttggcgggagccatggttatgcgtctggcgctgctggcaagtatcgcctgggttacgcgcctgacaaatccgctttttacaatattcagtcaggaaatttctgcccgtgatttgattctgcttctgggtggcttgttccttatctggaaagccagcaaggaaatccacgaatccattgaaggtgaagaagaagggctgaaaacacgcgttagtagtttcctcggcgctatcgtgcagattatgctgctggatattatctttagcctcgacagcgtgattacggctgtgggtctgagtgatcacctgtttattatgatggcagccgtggtgattgccgtaggcgtgatgatgttcgccgcgcgcagcattggtgattttgtcgaacgccatcctagcgtaaaaatgctggcgctctctttcctgattctggtgggctttaccctgattctggaaagtttcgacatccacgtaccgaaaggttacatctacttcgcgatgttcttctctattgcggttgaaagcctcaacttgattcgcaacaaaaagaatccgctctgatactccgtacgctctcctgcgggagggcgtactcactccttttaccctcacagtttaagattttcctgctttcaagatatataacgtcggtttataaacagactattatcataggtaggccaaatgaggataaccggatgaaaaaatgggcagtaataatttctgcagtcggactggcgtttgctgtttccgggtgttccagtgattacgtcatggcgaccaaagatggccgtatgattttgaccgatggaaaacctgaaattgatgatgataccgggctggtgagttatcacgatcagcaaggtaacgcgatgcaaattaaccgtgatgatgttagccaaattattgaacgttaacaaataaggtcagcatccggctggccttaagatttttctctttcccttttcccttccctctgccatttttatattccttatgtcgtgattataaaaaggaaacggctatgcaatatcaccgtataccccacagtagcctggaagtcagcacgctggggcttggcacgatgacgtttggtgaacagaacagcgaagccgacgcccacgcacaactcgactatgccgtcgctcagggcattaaccttatcgacgttgccgaaatgtacccagtacctccgcgccccgaaacgcaagggttaaccgaaacctacgtcggcaactggctggcgaaacatggcagccgcgaaaagttaattatcgcctccaaagtgagcggaccgagccgcaataatgacaagggcatccgcccggatcaggcgctggatcggaagaatatccgcgaagcgctgcatgacagcctcaagcgcctacagactgattacctcgatctttatcaggtgcactggccgcagcgcccgaccaactgcttcggcaaactcggttatagctggacggattctgcgcctgcggttagcctgctggatacgctggacgcactggcagagtaccaacgcgcgggaaaaattcgttatatcggcgtgagcaacgaaactgcatttggcgtaatgcgctacctgcatctggcggacaaacacgatctgccgcgtattgtcaccattcagaacccttacagtctgttaaaccgcagttttgaagtaggtctggcagaagtcagccagtatgaaggggtcgaactgctggcctatagctgcctgggtttcggcacgctgaccgggaaatatctcaatggtgcaaaacccgctggcgcacgtaatacgctctttagtcggttcacccgctatagcggtgagcaaacgcaaaaagccgtcgcggcgtatgttgatatcgccagacgtcatggcctggaccctgctcagatggcgctcgcgtttgtacgccgtcaaccgtttgttgccagcactctgctgggcgcaaccacgatggatcagctgaaaactaacatcgaaagtttgcatctggagttaagcgaagacgtattagctgaaattgaagcggtgcatcaggtttatacttatccggcaccataagattaacgccggttaaaaccggcgttaaatattaatgacggcgctgccagatccacagcgccgttattgccagcgcaaacagcgcaccgaagccaatgccaatgggcacgaccgggatgcctatcattaccgccaggctgtaaatgcccagcatcaacaacatggcgctgttttcgccaaggttttgtactgcaatcgcattccccgccccgacgctttttttaccccgctcctgtagcaacgcattgagcggaacgacaaaaaagccccccatcacgccaatcagcatcaacaaggcataggctggcagcagctcgtgttgcagggaaaaaatcagtaccaccacgccaatcaaaatcccggctggcatacagcgactcacggtttccagcgtaactaacttcgctgccgcacctgcgccaaccacgataccaatcgctaccatcgcgttgagataggtgggcgtagcgttatcggtaatgcccagcgccaccggtacccacagcaccaacaggaaacgcagcgtgacacccgctccccagaataaactggtgcccaccaggctaaaacgcgtttcaccattgcgccataggctggtgcaggcattcaggaaactgcgggtcatgttgatgagattccaggactgccccggacgcgccgccgccagtttgggaatgtagatattggcaacgaccgcaccaccgtaggccagtgcgcatgcggccagggcgacgaggacatgccagtcagccagcacaccaccggctacggaaccgagcaaaatcgccgctatggtagaagcttccattaaaccgttagctttcactaacttactacccgtggttaattcgccgagaataccgtatttcgccggactataggctgcagcaccaacacccaccagcgtatagccgagaaacggattgataccaaagcagatactggctgcgcccagcagcttcaggccgttggcaaacatcatcacccggcctttggcgaagctatccgccacctgcccgacaaacggcgcaaaaagaatgtaagcacctacaaacaccatttgcaggatgggctggctccactccggatagaactgcgctttcagtaacgccagagtggcaaacagtagggcattatcgccaaacgcagagagaaactgcgccacgataaccgctttcatccccttgctccacaagctagtgttagtgtgcacactctcactcatcgtgttgttccgcttcgtctacccagcttttcaacgtgacaaagtcaggtttgccgctgccaagtaatggcatctgtttcagatagcgaatatcgcgcggtacagcaagctccggcacgccgtgctcgcgggcatactgttgcaacttatcgcgcgtcagttcgttatctgtggtgaaaagcaccagtgcctcgcctttgctggcatcgctcttaatcgcagtggcatggactttatctgggctaacaccaagtgccagttgttccaccatttccaggctcaccatttcgcctgcaattttggcaaagcgttttgcgcggccctgaatctgcacaaagccctgctcgtcaaaacgcacaatatcgccagtgtcataccagccgcgctccatttcgccgcgaacattctcggcggtgggcacttccagtacacctggcttctccacccgcagatagccgttcattatgttcggccctttcagttgcaggcgtccgccctcttcgataccagggacgctcaacaggcgcgcatccattcctggtagaatacgccctaccgtaccgggtttcgccgccatcggtacgttgatagaaacgacaggcgcgcattcggtcacgccgtagccttcaaggatgcgcaggccaaatttatcctgccaaagctgtttggtactttcttgtaatttttctgcgcctgccaccacatagcgtagacgatagaagtcatacgggttggcgaaacgcgcgtagtgaccgaggaaagtgctggtgccgaacaacacggtgcaactgcggtcatacaccaactccggcacaatgcggtaatgcagcgggcttggataaaggaacacttctgcacctgtaagcagtggcgtaaacaggcctaccgtcagcccaaaggagtgaaacagcggtaacgcgctcataaagcgatcgttggtggtgaagtcggcaatcgttttaatctgctcgacattcgccagaatgcttttatggctatggacgacgcctttcggatggccttcagaaccggaggtaaaaaggatcagcgcctcttcttccggctgctgtttaacctgtgccagacgcggcatcagcaaatgagcgaagatccatactttgtcggcagtggtgacatctgcttttaaatcttccagatagacccagcgcacctgagtaagttgctccggcagatgccagagtttgcctttatcgagaaactggcgggaagtgaagatggttttgatttcagccgccgtaatagcactggtcagcccttttaccccggcagtgtagttcatcattgcgggcatgcggcgacgggcgatggccccaaaaatcactgccgcactgatgcctgcattgggcagcattaagccgatgcgttcgccttcaacactgtatttttcaaggatgcgtccaacaaacagcgttttcgtaagcaatttgcgataggagtctggggtaaagttgacgtcttcgacacatttcttcccggctccgaagcggtacattgcactcagtaaagattcgtacagcgtttcacgcgggcgcaccgccattcgcgcttccatcattatttgatgcagcatttcgccagcgattttgcgacggtcacgggcacgcggcgcatccggcatcgccacctgcgttggtggcaaaatatgcagagtaatttgcgggaacaagcgacgtttaaccagacctttcaggcggctgaagtgcgtaagttccgccccttcaatacgcacaggaataaccgtcgcaccagacttcgccgcgacaaaacccgcgccatcgtagattttcatcaggctgcctgtcgtggtgatgcgtccttcagggaaaatcaccactggtcggccctgttccaccagacgtaccagatgtttaatagccataggttgcgtcgggtcgagaggaacaaagtcgataaaacttttcagccaacgcatataccactgttggcttatactggtgtaaacggcaaacactggacgcacaggtaaaaacagtccaagcaaaatgccatcaataaaagagacgtgattaggcgtaattagaacgcgctcgcccttcagtgcctgggtgtcacccgtaacgcgaacgcgatacaaaacacggcacaaatttcgaaaaaagctaaaaagcattccaactccctttgctctgattcagtaaaagcgaatggagggagattacacgagataaagaacgcgagcgacagtaaattaggtgcgaaaaaaaacctgcgcatccgcgcaggttggtgcaagagacagggtacgaagagcgtaccgaataatctcaccaatcaatacctctgggatcttgattgtggtctgcacgacgactcttcgccagcgagaaaacgcaaaggaatgaagggaaatgcaacgaggtgtgtaaattgtcggttactgttacagattgatgaccggcaaaaaaaacctgcgcatctgcgcaggctggtgtaattcatgtgctcaacccgaagttgacttcacctatcaatacctctgggatcaccactttagcaacctgaagccaaacgccaccagcggtcaatcgcaacagcgtttcgcaaagtgtaaccaaaggtttgcaatctctttttttgtcttacttatttgcgtttggctcacattcccacgatgaaaacacgccaccccttgaaccaacgggcgttttccgtaacactgaaagaatgtaagcgtttacccactaaggtattttcatggcgaccataaaggatgtagcccgactggcaggcgttagtgtcgccaccgtttcccgcgtcattaataatagtcccaaagccagcgaagcttcccggctggctgtgcatagtgcaatggagtctcttagctatcacccgaacgccaacgcccgtgcgctggcgcagcagaccactgaaacggtcggtctggtcgttggtgatgtttccgatccgtttttcggtgcaatggtgaaagcggtcgaacaggtggcttatcacaccggtaattttttattgattggcaacggttaccacaacgaacaaaaagagcgtcaggccattgagcaactgatccgccatcgctgtgctgcgttggtcgtccatgccaaaatgatcccggatgctgatttagccagtttaatgaaacaaatgcccggtatggtgctgatcaaccgtatcctgcctggctttgaaaaccgttgtattgctctggacgatcgttacggtgcctggctggcaacgcgtcatttaattcagcaaggtcatacccgcattggttatctgtgctctaaccactctatttctgacgccgaagatcgtctgcaagggtattacgatgcccttgctgaaagtggtattgcggccaatgaccggctggtgacatttggcgaaccagacgaaagcggcggcgaacaggcaatgaccgagcttttgggacgaggaagaaatttcactgcggtagcctgttataacgatagtatggcggcgggtgcgatgggcgttctcaatgataatggtattgatgtaccgggtgagattagcttaattggctttgatgatgtgctggtgagtcgctatgtgcgtccgcgcctgaccaccgtgcgttacccaatcgtgacgatggcgacccaggctgccgaactggctttggcgctggcggataatcgccctctcccggaaatcactaatgtctttagtccgacgctggtacgtcgtcatagtgtgagtactccgagcctggaggcaagtcatcatgcaaccagcgactaaccgcagttaaagcaattccagcgccagtaattcttcgatggtctggcgacggcgaatcaaccgcgcctgaccattatcaaacagaacttctggtaacagcggacggctattgtagttggaactcatacttgcgccatatgcccctgtatcatgcagtaccagataatcacctgccttcacttccggcaaggcgcgggtttcaacatttcccccttcctgctgggtaaagacatcgccgctttcacataacggtccggcgacgacggtttccaccgttggcgcgtgttccagagaacgaccatcagctgccagggcactgatatggtggtaactaccgtacattgccgggcgcatcagatcgttgaacccggcatcaaccagcacaaagtggcggctccccatttgtttgacgctccgcacctgagtaattaatacgccagactgcgctaccaggaagcgacccggttcaatttccagtttcacagggtggcccaaatggcgggcgatttgctcacgcgcggcattccacagaccataataatgttcggtatcaaccgcctcttcaccctgttgataaggaacagaaagcccaccgcccgcagaaatagcctgtaaatcctgaccgaattcgatgacctgacgcaccatagcaccacacacctgttccagatgggcataatcaacgccagaaccaatgtgcatgtgaatgccgaccagctgcagatgatgacgttgtatcacgtccagtgcggcgggcagatcggtgtaccagataccgtgcttgctgttttcgccaccggtattggttttttggctatgtccgtgaccaaaccccggattaacgcgcagccatacccgatgccctgggctaacctggcccagttggtcgagcatatcaacagaacccgcattcaccggaatttgcaattcactgacgcgttcaagcgtcgcctgatcgataacatctgccgtaaaaacaatatcatcggggtgcgtttgcggattgtaacccgccgccaacgcacgctctatttcgcctaagctgacggaatccactttcacgccctgctcacgcattaagcgcaaaatatgaatattggaacaggctttctgtgcaaagcgcaccacatcaaactgtttcagcgctgcaatctgccgacgaataatttgcgcatcgtagacccacaccgggcagccaaattcagcgggcaaacgcagcagattttcggcggtgagatcggtatcggtgctgaacagactatgtggcataacaaactccagataagtgcttttttatgattacgccacatcataaaaagaataaaaaatatcgatttatgtcgagtctatgcaaaaatgatatggattaccggattgcgagagagcgctaatggccgccgttaacttacgtcatattgaaatttttcatgcggtaatgaccgccggaagcctgactgaggcggcacacctgctacacaccagtcagccaaccgtcagccgcgaacttgcgcgctttgagaaggtgatcgggctgaaattgtttgagcgcgtacgtgggcgattacatcctaccgtgcaaggactgcgtctgtttgaagaagtgcaacgatcctggtacggactggatcgcattgtcagcgccgcagaaagtctgcgcgagtttcgccagggagaactgtctattgcctgcctgccggtctttagccaatcttttttaccgcagctcctgcaaccctttctggcacgttatcccgatgtcagcttaaatatcgtgccccaggaaagtccgctacttgaagagtggctcagcgcccagcgtcatgatttaggactcactgaaacgctccatacgcctgcgggaacagaacgtaccgaattactctctttagatgaagtgtgtgtgttacctccgggtcatccgctggcggtaaaaaaggtattaacgccggatgattttcagggtgagaactacatcagcctttcccgtactgacagctatcgccagttgctggatcagctatttactgaacatcaggttaaacgacgcatgatcgtagaaacccacagcgccgcgagtgtctgcgcaatggtacgggcgggggtaggtattagcgtggttaacccgctcaccgcactagattatgcggcaagcggtttagtggtgcggcggttcagtattgcggttccgttcaccgtcagcctgatccgccccctgcaccgcccgagtagtgcgctggttcaggcgtttagtgggcatttacaagcggggttaccgaaactggtcacttctcttgacgctattttgagcagtgctacgacagcataattagctcagcataaaagcgacagcatcctcggcatggatcgccgcggtatcaaacacaggcaaaacactgcgctcttctggcaccagtaaaccaatttctgtgcagccaaaaatgacgccctgtgcgccctgttctgcaaggcgagcaatcacttgcgcacaataagcgcgactcgcttcggtaaattgccccagacacagttcttcaaaaataatctgattaattttcgcccgttcatccgcttcaggaataagacaattgatggaaaattgttccgtcagccgcccgcgataaaaatcctgttccatggtgtaacgcgtacccagcagcgccacacgagtcattccggccccggtaattgcacgtccggtggcatccgcaatgtgtaagaaaggcagagtgcaacgactctcaatggcatccgccactttatgcatcgtattggtacatagcacaataccttctgcgcccgcccgctgtaagccaagcgccgcctcagccagaatgtccccggttttatcccattccccgcgacgctggcactcttctatttcatgaaaatcgacgctatgtagcagcacttgcgcagagtgaagcccaccaagccgctgtttaatgccttcatttatcaaacgatagtaaggaatggtggattcccagctcattcctcccagcaaaccaattgttttcattcctctctcctgatgtgtgttaccgcaacaaggctgaataaggaacgagacaaacgcctcaacggccaagtgcccaatctctattaacgaaaaaagggccggatgtacagcacatccggcccgtgaaatcagacgccgatatttctcaacttctcgcctgccatcagtttgcgttcgatatgttccagcgtgacatttttggtttccggaatgagccagaaagtaatgcccacaaacgcaatgttcagcgcagtgtagagccagaacgtaccggcagcgccaatgctatcaagcagtgtcaggaaggtcgcgccgataatcatattgctcacccagttcgtggtggtgctacaggtaataccgaaatcgcggcatttcagcggctgaatttcagagcacaggatccacaccactggcgcggcgctcatcgcataaccggcaatacacatcatcgtcatgccaacagagagccaggacaagccactggaagccgtaccgttatcaaactgcatcaggcaatagcccagcaccagagtgcctaacgccatcacgctgaaaccaattttcagagccggtttacgccctgctttatctaccgtaaacaccgcaataaaggtggcgaacataaaggtcagccctacgaccagagtcgcaatcatctgttgttctgtggtcgtaaagcccgccattttgaagatacgcggcgcgtagtacatgatgatgttcataccggtaaactgctgcatcgcctgcaacaacataccgagaaacacagcacgacggacgttacggttgatcttaaacagtgcccaaccgccctgttttaacttcaggctttcacgaatttcgttgagttcttctcgcgctttttcgctcgtatcgcgcagcatacgcaatacttcttccgcctcaatatgacgccccttttccgccagccagcgcgggctatttggcaggaagactaccagaataatcagcagaactgctggtaaagcaagaacccccaacattgcgcgccagttaccgctataactgaacgctgtatcggataaaaacgccagcacgatgccgagtgtgaccatcaactggtacatactgatcatcttaccgcgaacgttttcacttgccatttcagaaagatacagaggagcggtgtaagacgcgatcccgacagcaatgcccagcaccacacgagcggcgattaacatctctacgctggtcgcaaaagcggaccctatagaaccgagtacaaacaggatggcccccgccatcaggctgtatttacgccccaggcggaagctcagccaaccattaaacagcgcaccaattgctgcaccgagcatcatgctactaaccacccattcctgcaaacgactggtcagcacaaagtgatcggtaatgaacggcaacgctccggcgattacgccgatatcaagaccaaataacaatcctgcgaccgcagcagctacgctaacaaacatattcatacgccgcgtatcccgcaaagaacgtggcgttaaagcagattccgtattgatagtaaccattttttcctgccagcagagagtaagacatagtgaaaaaatacgtgaacaactcacgcaggtgtcaggtcggaaacagcataaatatggattaaattgctgcgacatgtcgttatgtgatggatattccaattttcaaattaagttgaattattgagattattattaaccacctaattttacagcagataaaattcataaagttcattaattgataattaatatggattatttcataaccatgatatggattatgatgatctacaggtataaaaaaccctgccatgcggcagggtcataaaagtaagaagaatgaattaacgcgccagccaaccgccatccacggcaatggtataaccattcacataatcactagcgctggaggcaaggaacactatcggccccatcaggtcactcggcagtccccaacgaccagctggaatgcggtcgagaatttccgcgctacgttgttcatctgcccgtagttgttgagtattgttggtcgccatgtaacccggggctatcgcattaacattaatgttgtgtttagcccattcgttcgccatcaatcgcgtcacacccatcacgccgcttttacttgcggtataagaaggcacacggatcccgccctggaaggagagcatactcgcgatattgataatcttgccgccattgccttgcgcgataaagtgtttcgccgctgcctgagacatgaagaatacgctcttgatattcaggttcatgacatcgtcccagtccttttcgctgaactcgagagcatcttcgcggcgaatcaatccggcgttattcaccaggatatcaatatgaccaaactccgctaccgcgcgatccagcagtgctggaataccatcaatctttcgcagatcggcggtcaggcttaaaaaacgacgccccagcgctgtgacctgctcgatggtttcagtcggttcaacgatgttaatgccaacaatgtcacagcccgcttgcgccagccccaacgccatcccctgacccagtccagtatcacaaccagtgacgaccgcaactttaccttcgagagaaaatgcacttaaaatcataacaataccttattcgtttatgcccacaattagcgcaaatctttaacggccacatggtccatatcatcaaagacctggttttcaccgaccatgccccagataaaggtataagctttggttccgacaccggaatggatgctccagctcggggagatcaccgcctgctcgttatgcatcacaatatgacgcgtttcttgcggctgccccatcatgtggaaaacgcaggcgtcatcatccatattgaaatagaaataaacttccatccggcgctcgtgggtgtgacacggcatggtgttccacaagttacccggagccagctccgtcagccccatactcaattggcaggtttccagtacatccgggacaaaatatttgttaatcgtgcgacggttactggtgaggttatcgcctaacgtgactggagatacttcgtccggtgtgacttttttggtgggatacgtcgtatgcgcgggtgcgcaattgtaataaaacttcgccggagtgccggtatcaatactggcaaagacaacttcttttgcacctttaccaacatacagggcgtcgcggtgaccgatttcatagcattggccatcgacagtaatcgtaccggcaccgccaatattgataacacctaactcgcgacgttcaaggaaatagcttacgccgagttgtttaccaacttccccgccaacggaaaccgttttagttatcggcataatgccgccaacaataattcggtcaatgtggctgtaaaccatggtgtactcatcggcgacaaataccttttcaaccaaaaattcattgcgcagcccttgggtatccagcgtttttgcgtgcgcactgtggatgctctgtcttacgtccacatcaacctccgataatcagtgaagcgtgaaaatagaaaacgatagtgaaacactgtttcgttttctctataaagggatgatatgcccatgggctagggttttcaattaaaaataaaacaatgtttcatttttaagttaaggattaaaaaaagtgcagtgtcgatcacgaatatgtcatgagaatggaaaaatgagggagcccagaaaatgtatgtcgacttgccagccatcattattcaacagattaatgacggcagatatttatcggtaaggaggaaatgcagagttattcgtcacgttcaatggtcaatgccacaccctggcccccgccgatacaaagcgttgccagtcctttgcgggcattacgtttcaccatttcatgaaccagagaaaccaggattcggcaaccggaagcgcctatcgggtgaccgagtgcgatcgcgccaccattgacattgacccgacgctcatcccactcaagcatcttgccaacgctaagcgcctgtgcagcaaacgcttcattagcctcgataagatcgacttcagccaactgccagcctacacgctccaggcaacggcgggtcgcatacaccggcgcaattcccatcaatgccggatctacaccaacgctggcaaatgcgcgaatgcgggccagcacgggtaaattcaacgctcgtgctttggcttcgctcatcatcattaccgcagctgcgccatcgtttatggaacttgcattacccgctgtcacagaaccgagactatcaaaactaggatttaaacgggctaagccttctgcgctggcgtcagtgcgtggctgttcatcggtatcaacaaccaacgtctgcccgttactttgggtcattaccgggacgatctcatctttaaatcgtccggcgtcaatcgccgctcgcgctttttgttggctgctaagtgcgtaagcatcctgcaactgacggctgatgccatattcgcgagccagattttcggcggtgacaccaatatgataatcattgaaggcatcccacaacccatcatgcacaagactgtcaaccaactggctattgccaagctgtgcaccggtgcggctatcagtcagaacatgtggtgcgcggctcatgttttcctggccaccggcgatgacaatatcagcctcgccacactgtatcgcctgagtagccagatgcagtgctttaagcccggaaccgcaaacgtcattaatagtgattgcagaaacgctattaggcagaccacctttaatagcgctttgccttgccggattctgccctgcccctgcagtcaacacctgaccaagaattacttcatccaccgcatatgcaggaacgccggtacgttctattaacgctttcacgaccagactaccaagttccacggcggaatgacccgctaacgcaccacgaaagcagccgataggtgtccgtaacgccccgacaatcacaacgtctttcatcacaacctcgcaccaattaacagtgcaatagtaaatgattgttaattacagttatcttaattgtttaaaaaaagtgatttttatcacaaaggaaatatgcctgagcagcagtcagagacataactggcacgtaaggtttgcaaccactaacccaccaatagaggggtagatagggcgttaatctcccatacttaacctggtttatggtaaattgccctccattttgtttaatttgtagatgatacgttcagataatgtctaatatttggtctaaagaagaaactctgtggagtttcgcgctctacggcacagccgttggtgcaggcacgctcttccttcctattcagttaggtagcgcaggggctgtggtcctgtttattactgctctggtcgcctggcctttaacatattggccacataaagccttgtgccagttcatcctcagtagtaaaacaagtgcaggtgaagggataacgggcgcggtaacacactactatggcaagaagattggtaatctgattaccacgctgtacttcatcgccttttttgtcgtcgtgttgatatatgcagtggcaattaccaacagtcttacggaacagctggcaaagcatatggttattgatcttcgcatccgtatgttggtgagtctgggtgttgtattaattctgaatctcatttttctgatgggacgtcatgccactattcgggtaatgggatttttggtattcccattgattgcctatttcttatttctttccatttaccttgtcggtagttggcaacctgatctattaacaacccaggtagagttcaatcagaatacccttcaccagatatggataagcattcccgtgatggttttcgcctttagccatacgcccattatttctacgtttgccatagacagacgtgaaaaatatggcgaacacgctatggataaatgcaaaaaaattatgaaagtcgcttatctcatcatctgcataagtgtactgttctttgtctttagctgcctgctttctattccacctagctatattgaagctgctaaagaagaaggggtcaccattttaagcgcgctttctatgctgccgaacgccccagcatggttgagtatttccgggattattgtcgcagtagttgcgatgagcaaaagtttcctgggtacgtactttggcgttattgaaggtgccacagaggtcgtcaaaacaacactacagcaggttggtgtaaagaaaagtcgtgcatttaaccgcgcactaagtattatgttggtaagcctgattaccttcattgtttgttgcattaacccgaacgcgattagcatgatttacgcgatcagcggcccgctcattgccatgatacttttcatcatgcctacgctgagtacgtatctcatcccggcgcttaaaccctggcgttccatcggaaatctgattacgctgatcgtgggtatcctgtgcgtaagcgtaatgttctttagctaatatcagttgtggatggttcaaaattgctacaattttgaaccattccatttttcataatattcatttgttattattccaccctatcacttctctcgtcatatcctagtattatcagttagttaaacacacaaagagatctgaacatcttaaataagactatttaagatgcataacttagattcgcaagatatcttctggtcattcaaaaacaatttgcgatatagatattcttataccatgagatagttatctggaccgctctcaaccatgcaagattaaatcagtgaaacataatcatatttgataacgagaaatgcatttttaaatgccttactcagaattatagcaaatacagattaatcgcaatttttcccggcaaaattacaaaatcatggtgtattgacatcatcaataaccaatgaaattatgcaattatatacggatagggaggttcttaacatggggctttgtagtcgttataaaagtcttacatgcaatagttgcagtatgcattgccaaataatgccagaagagagtccgcgtttgcagtattgcgcaaacagctgtttttgtatgtggcccgaagaaagtagttattttaatcgtggtgtggtagaaggtatcttaacaaaaaaccacaatgcgagattaagcggatatatttttgtcgattttagtgtaagttttttacgtctattccttgaaaaagactggattgactatcttgcaagtactgacatggggattgttttagtcagcgaccgcaatatgcaaagcttagctaattactggcgaaaacacaacagtgcaatatctgctgtcatatataatgatgatggtcttgatgttgccaatgaaaagatcagacaactatttattggtcgttatttaagttttaccggaggtaacacattaactcagatggaattcaccataatggggtatatggtttctggttataatccatatcagattgctgaagttctggatatggatatccgtagcatctacgcgtacaagcaacgaatcgaaaagagaatgggtggtaaaataaacgaattatttattcgtagtcatagcgtccaacattgatactcaacgaccagccagaatcatactctgtttatacgggcatttattgaaatgtccgtattttataaataggccgtcccctcaagagtaaacaccatagtatttaaaaccatcacacgaaaaattcagaagcattacgaaatatgaatttacaaacaatagtggcataaatgttaaccatgttaatttacgtaaagttttacgttgcaacattaaagcctcatttcaatcatcatgataaatataaaattaatatatatttatgccgtaaataccaatatacttagcaaactatgtgatctccatttcgattgatttagtgtttattgacgtatgtactggattattaacgataatatcgagttctggcctgagcaccgaaaattaataagcgtacataacgccgatcttaacgtcgttctgacaacgccagccagtcgatgtttaagtcttctacttgaagcttttcctgatgtggttgcacaacaagattttttcaccagagtctgggaagaagaaggtatgcgtgtgcctactaacacgttatatcagaacatatccattatcagacgcggatttcgcgctgttggtgatactacccacagcctaattgcaaccgtgccgagaagaggattcaagatccataatgacattaacatacaaaatcatgtaataaacagcagtacagacgcacatacacacaatgccccacctgccataaaagttaatgcgggatacaaagagagcattggtggcgcaaagaatttcaataacaaaatcctcaaacatataaaaagtcatctaattatgttgagcgcatttgtcataggcgcatattctgcatattggctatggaataataatcaaccgaagccatttttcaaggattacaagactgttgcggaaattaatggctgccattttaatgtaacagaagatacaattgatgggttgaaagagttcgataaatataaaacacggatactggatagcgggattaactgtaaaaaacatccgtggttatacttccctcttgcaaaatccagtccggggatgattgttatggcatgcaataaaaactataaccaacatgaagtggcaaactgtttaaccctgtcttaccgtgaggttaatcgtgattgattataaaaaaaacttattatttattttagtttttatcagtgggtttattctcttcactgtctattcttacactgcagaaaaaatgatatataacgaaacatgcactgcaaattgggtaatttttaatgaccagggacgagcaaatcttaccatcgactttatgtataacaaaaaaaataaaacaggaactgttgcgttgagtggaacctggcaacaaggtaacagagaaagtaaaagtatacggcgaaatattgaatacacatggattgaaaactatgacacagcccatttaacaagtaagaaagttaataagtttgagattatggatcaagttgatgatgatagacttgcacaacttattcctgatttttatgtctttccagaaaaaagtgtaagctataatatactaaagcaaggtaagcatgcttttattttgagcattggtaacagagcaataatgcattgtgcaaggtaaactaaaatagataacaaaaagatggaacctcgttaatcataaaacaataaaattaaatattctcgcagtatatggcagtctaaagcatcaaagatttgatcaacatctttcattttagacatctccttgcaatgtaaaatatcatgtatcaacaacatctggtgcaaatccaactgtcgaactcgacattcatcttagctcgattattattccttcgtacagtgcttgtaaacaatacagaaagaggattattaagaaccagtttactcagactatcaatagaggaaaggactaacgtttctttaaaagaattgatttcatcatctgttaaactaaactcatcattgacagatcgactgatataactgtttttaactttactctttacgttgactttattgacagaattaacattcacatatctactatttaatgtccaacttgttgtttgcgtgagaacattctcagcattaaggaatttttttaacggaatccttggtttctttttgctgtcgctatttacaatatcatgcatatagaccatttcatgaatctggctaaattcaatgtccattgtatacctcacatttttaccgtgactcgatgttactgttcaataatcaccttccatcaatactaaaattaatacccctaatgtgccgataacaaatatagtcattctacgtaacgtctccataaggtgatatttgacattatcagaagctgcgaattcggattttgctctaatcaaatgagagaaatgtaaaatgaagccacgaaatattaataatagcctaccactgcaaccattagttcctgatcaggagaacaaaaataagaaaaatgaagagaaatccgttaatccagttaaaatcacaatggggtctggtttaaattatattgaacaagaatctcttggaggaaaatatctaacacatgatttgagtataaagatagcggatatttctgaagagataattcagcaagcaatattatctgctatgagcatatataaatttagcataacagatgatttaatgagtatggctgtaaatgaactcataaaactgaccaaaatagagaataatgtagacctgaataaattcactactatatgcacagacgttctatccccccgcgtcaccagacataataaagaaaaaaacaaacgacattctacccttctcaaaaatcccctttttaattttcattgaaaaaatggcaattgatactatgaatccaggtcatacacattaaggcatttatgtaatgtcgtaattaagataactaataaggtgaatattagtaaaacaactaatgatgttattagtttgtagtgaacagtacttttaccaataatgaaaaatataccataagcaatgcaagcttaaaactcataatttaaaaaagataaatataaaaatatcaatgagtcaatcaataataatttggcatcacgagacacatcacagaggaatattatgagcacagaaacaattgaaatattcaataatagtgatgaatgggcaaatcaactaaaacacgcattaagcaaaggagaaaatctggcattactacatggtttaactcctgatatccttgatagaatatatgcatatgcattcgactaccatgaaaagggtaatataacggacgcagaaatttattataaattcttgtgcatttatgcgttcgaaaatcatgagtatctaaaagattttgcaagtgtatgtcagcccaaaaagaaatatcaacaagcatatgacctttacaaactaagttacaattacttcccgtatgatgactatagtgttatttatcgtatgggtcaatgtcagattggggctaaaaatatcgataacgcaatgcaatgtttctatcacattattaacaattgtgaggatgatagtgttaagagtaaagcgcaggcatatattgaactcttaaacgataatagtgaagataatggctaagcattacaatcatttggttaaatttgctggttatagtgcagttaaccactataaccagcacctcttatgttttcttaaatcagcatcttaaaacagttaagagcatactataaatcattatttttcaatgcgttagagaacaatctactttatcaaaattgaataaggctatttcagattacatcactgaattcctaagataaattagtgaacacaaccatagatatgtcaaatgtaatttcctgtagcgttaatgacacataaatatgaatagccataatttctattgcttaagcaggatgcaagaaaccaattttttcatagaggttaactaatggacttagaaaataaattcagttatcattttcttgagggattaacgctcacggaagatggaattcttactcaaggaaatgagcaagtttatattccacagaaagagttaggtgtattaatagtattacttgaatccgctggtcatgttgtactgaaagatatgatcatcgaaagtgtatggaaaaatattattgttagtgacgagtccctgacaagatgtatctattctttgcgctgcatttttgaaaaaattggctatgatcgttgcatagaaacaatctaccggaaaggttatcgtttcagcgggcaggttttcaaaactaaaattaatgaagataatactagtgactattccatagctatattccctttcactactagtttgaatacactggatccattaatacttaatcaggaattagtgcaaatcattagtaataaaaaaatcgatggtctctatacctatccgatggctgcgacaaatttttgtaatgatcacatatctcaaaatagtttcttgagcagattcaagccagattatttcgttacaggaagaataaaccagaataatgcagtgaacactttatacattgagttgatcgacgctaaaaaccttttcctcatcgccagtaatcatctccctgttgatgaactacataatacaagtcaatttattatagataatatccttcaaacggtacataaaccagaacgatctgtaagattagctaagcaggaccaaggatataagaatcattatttaagtgatgaaatgttagccggaaagaaagaactttacgacttcacccctgaaagcatttacagggccatgactatatttgatagattacaaaataaaagtgatatacagacgctaaaaacagaatgttattgccttctagcggaatgccatatgtctttggcacttcatggaaaaagtgaacttgaacttgctgctcaaaaagcattagagcttttagattatgtaagtgacataaccactgtcgatggaaaaattttagctattatgggactgataactggtctgtctggacaagcaaaagtatctcatatcttatttgaacaggctaagatacacagtactgatatagcctctctctactactatagggcactagtccactttcataatgaaaaaattgaagaggcaaggatttgtatagacaaaagtctacaactcgaacccagaagacgaaaagcagttgtgataaaagaatgtgtagatatgtatgtgcctaacccgctcaaaaacaacattaaactctactataaagaaactgagagtgaaagccatcgagttataattgacaacattttgaaattaaagcagctgacgagaatttgtatgcgataaatttttattgacgcaattttattatttagatgtatgcaacttgttatttaaacaacagagataaaaatatctaagatattcaccttattgcaagatatttaaaatgctctagagttaaaagtatgatgtaaagaccattggcctggacaattaaaaaagggagctttatgactaatccaatcggtatcaataatttatctcaaagtagtaatatagcgaatgcaacgggtgatgaagtcgtaagtttagataaacacatcaacaccagtgctactgatacagatcaaatacaagcatttatagttagtacatggatggcgccttttcaaaatgatatgtatagtgaagataatcctatcagtccttactataaaattgagtggtaaacgattgaccaaataaatcataacgagatacttttataatagtatctcgttcctttcattcaatcctcacacatgaaaaaatatgcgctcaccaaaagttaaattcttaaccatcttcacgttttgtatatttattacaaaaatgtctttcgccagcaactcttgctctaatgaagcaggaacaatgttcagaatcgaaccaaatttaattaaagctatcgctcttgttgaaagcaatctaaaaaaggatagcataggcaagaacagagataagaataacaatataaagagtttagattattggttaatgcagataaaccagatgcatattcccctgttaaaaaaacgtggaataataaaagatgaacgagatttgttagataacccttgtctgaacattaaaataggaaccgagattttatataaccattttagtcgttgtggagtaacgtggcaatgcctggggacttataatgcgggttttgcaatggataaccaaaaaaagagacagcaatatgccccaaaatatatattgtatataccaggcttaatgaactaaacaatcgtaaggcttcagcaaaatgagcctaaagcctcttttttttatatagtgcaaacacccatacgtaaagctgttttgatcaactcgataccactgtgaacatctaatttcttcatgatattgagtctatgagtttcgactgttttcctgcttaactgcaagaaattagcgatttctttgtttgttttaccatcagctatgagttgtaatatttcactctcacgatttgtaagttgattatcagaggaatacctggaagatattttttcacaatccatatgtacactatcaaaataagtgtaaccattactaatgctatcaatagcacgatttagtttcgccgggtgactggttttccatacgcatcctttcgcacctgcttcaagcaattttatactatcaatatacggcatctttgctacaaatgtaataatatgagcatctatcttatggcttttaacccattttacgagttcggcccccatcattccacctgcaaattctcctaaaataaatatttaggctgtagatttgttacactccgctatagctttcttcagatctttatagcccacttatttaacaacttgaaaataaggtgttttacctgggttgttacaaaaggattgcattgcgtaaacgctttttatttacaacaaaatggggaagtattacggcgaagataaattggagcgggcgaagggaatcgaaccctcgtatagagcttgggaagctctcgttctaccattgaactacgcccgcttcgagatgcgtaaggcattataaaccttacgctctccttagcaagtgccacgctgctgactgctgattaattcgccatcagcattttggcttgctgccctgaggcggcaagtaacgtagcggatcaattgccgttgcacggtaacgaatctggaaatgcaggcgaacagatgccgcatccgtgctccccatagtggcgattttttgcccagccttcacgctttgcccattatttaccagcatcgtgtcattatgggcgtaagccgtaatgtaatcttcactgtgtttaatcatgatgagattaccgtagccacgcagctggttgcccacatacaccacctttcctgcacccgcggcgtaaataggtgtaccccgtggagcactgatatcaatccctttattgccgccatctgctgtgctatacggcatgataactttccctgtcgttggccataaccaacaacgttgccctactggcggccaggaacttttcggtaccgcactactcggtgtaacgcttgcggttttggtcgtacttttggcggtacttttacgtgtaatactgctacttttcgccccacccagttttagtttctgaccaacttcaatggtgtaagggggggaaatgccgttcagtcgcgccagttcttttacgctggttcccgtggtgcggctaatacgatatagcgtatccccccgtttcacggtgtaaacggagccggaatacgttcctgtatcggaacttttgctaccgctacagcccgccaaaagcagtccaacgcttaacaacatcacgatacccagagattttttattcaggcgtcccgcactcaaaatctttcctcgcttaaaaaacaagacgccttatcatagcagccagcctcttgatacccaatctcttgcttctggaaaaacgtggtaatagagaaagaggttaatttcatttggcaaagggaagtatcatcagcaaaatattcgctgtagaggtatcgaacttcctgactttttaccctatttcccatcctgatgcgtaataatcccaatttatcacattgattttatcgccactcatattgatacgtatcactgcccctattcagagtcctgtttcgtatcatatctgtgtttttttaacgtcatcacacttcctacctcccctaacgcttatcgtcgtttctggcgtaaatcttgcctgcttagactaaatctttgccataagaaccaaatgttcaaatcgaggggatttctatggaagcgcgggaagcaaccgctacgggtgaatcatgcatgcgcgtcgatgccattgctaaggtcaccgggcgggcacgatatactgacgattatgttatggcgggcatgtgttatgcgaaatatgtacgtagccctatcgcacatggttatgccgtaagtattaatgatgaacaagccagaagtttgccgggcgtactggcgatttttacctgggaagatgtgcctgatattccattcgctacagctgggcatgcctggacacttgacgaaaacaagcgcgataccgccgatcgcgcactgctaactcgccatgttcgtcatcatggtgacgccgttgccatcgtcgtggcccgcgatgaactcacggcagaaaaagcggcgcaattggtcagcattgagtggcaagaattacccgttatcaccacgccagaagcggcgctggcagaagacgctgcaccaatccataacggtggcaatttactgaaacaaagcacgatgagcacgggtaatgtccaacaaacaatcgatgccgccgactaccaggtacaggggcactatcagacccccgttattcaacattgtcacatggaaagcgtaacaagcctggcgtggatggaggatgacagccgaattaccatcgtttccagcacccagatcccgcacattgttcgccgcgtggttggtcaggcgctggatattccctggagttgcgtacgagtcatcaaaccatttgtcggtggcggttttggtaataaacaggatgtactggaagagccaatggcggcattcctgaccagcaagcttggcggcattccggtgaaagtttcccttagccgtgaagagtgtttcctcgcaacccgtacccgccacgcttttaccattgacgggcaaatgggcgtgaaccgcgacggaacattgaaaggttatagtctggatgttctgtctaacaccggcgcttatgcatctcacgggcactccatcgcttctgcgggggggaataaagtcgcttacctttatcctcgttgtgcctacgcttacagtagtaagacctgctataccaacctccccagcgctggtgcgatgcgtggttatggcgcgccacaagtcgtatttgccgttgagtctatgcttgatgacgccgcgacagcgttaggtattgatcctgttgaaattcgtttacgcaacgccgcccgcgaaggagatgctaatccgctcacgggcaaacgtatttacagcgcagggttgccggagtgtcttgaaaaaggccggaaaatctttgaatgggaaaaacgccgtgcagaatgccagaaccagcaaggcaatttgcgccgcggcgttggcgtcgcctgttttagctacacctctaacacctggcctgtcggcgtagaaatagcaggcgcgcgccttctgatgaatcaggatggaaccatcaacgtgcaaagcggcgcgacggaaatcggtcagggtgccgacaccgtcttcagccaaatggtggcagaaaccgtgggggttccggtcagcgacgttcgcgttattagtactcaagataccgacgttacgccgttcgatcccggcgcatttgccagtcgccagagctatgttgccgcgcctgcgctgcgcagtgcggcactattattaaaagagaaaatcatcgctcacgccgcagtcatgctacatcagagtgcgatgaatctgaccctgataaaaggccatatcgtgctggttgaacgaccggaagagccgttaatgagcttaaaagatttggcgatggacgctttctaccaccctgaacgcggcgggcagctctctgctgaaagctccatcaaaaccaccactaacccaccggcgtttggctgtacctttgttgatctgacggtcgatattgcgctgtgcaaagtcaccatcaaccgcatcctcaacgttcatgatagtgggcatattcttaatccactgctggcagaaggtcaggtacacggcggaatgggaatgggcattggctgggcgctatttgaagagatgatcatcgatgctaaaagcggcgtggtccgtaaccccaatctgctggattacaaaatgccgaccatgccggatctgccacaactggaaagcgcgttcgtcgaaatcaatgagccgcaatccgcatacggacataagagtctgggtgagccaccaataattcctgttgccgctgctattcgtaacgcggtgaagatggctaccggtgttgcaatcaatacactgccgctgacgccaaaacggttatatgaagagttccatctggcaggattgatttgaggataacatcatgtttgattttgcttcttaccatcgcgcagcaacccttgccgatgccatcaacctgctggctgacaacccgcaggccaaactgctcgccggtggcactgacgtactgattcagctccaccatcacaatgaccgttatcgccatattgttgatattcataatctggcggagctgcggggaattacgctggcggaagatggcagcctacgtatcggctctgcaacgacatttacccagctaatagaagatcctataactcaacgtcatctcccggcgttatgtgctgcggccacgtccattgctggaccgcagatccgtaacgtcgctacctacggtggaaatatttgcaacggtgccaccagcgcagattctgccacgccaacgctaatttatgacgcgaaactggagatccactccccgcgcggtgttcgtttcgtcccgattaatggctttcacaccgggccgggcaaagtgtctcttgagcatgacgaaatcctcgtcgcctttcattttccgccacagccgaaagaacacgcgggcagcgcgcattttaaatatgccatgcgcgacgcaatggatattagtacgattggctgcgccgcacattgccgactggataacggcaatttcagcgaattacgcctggcatttggtgttgccgcgccaacgccgattcgctgccaacatgccgaacagactgcacaaaatgcgccattaaacctgcaaacgctggaagctatcagcgaatctgtcctgcaagatgtcgccccgcgttctagttggcgggccagtaaagagtttcgtctgcatctcatccagacgatgaccaaaaaagtgattagcgaagccgtcgccgcggcggggggaaaattgcaatgaatcacagcgaaacaattaccatcgaatgcaccattaacgggatgccttttcagcttcacgccgcaccaggcacgccgctcagcgaattactccgcgaacaaggactgctaagtgtcaaacaagggtgctgcgtgggtgaatgtggtgcctgtacggtgttggtcgacggcacagcaatagacagttgcttataccttgccgcctgggctgaaggaaaagagatccgcacgctggaaggtgaagcgaaaggcggaaaactttctcatgttcagcaggcttatgcgaaatccggcgcagtgcagtgcgggttttgtacgcctggcctgattatggctaccacggcaatgctggcgaaaccacgcgagaagccattaaccattacggaaattcgtcgcggactggcgggaaatctttgtcgctgcacggggtatcagatgattgtaaatacagttctggattgcgagaaaacgaagtaaaaggatatccggcctgaattcaggccggattcactgaggttatgtgtttaacaactcatatttcttaatcttgcgatagagcgtagcaatgccgatgcccagttcatcagcaacttgcttcttgctgttatgacgactaagcgcctcgcggatcatttgcttttccatctcctccagcgccgtgccgcccgcatcatcgagactcaggtgcgcctcactgacctctgttacatcactttgctccgttgtgccattattcagcagatttggcggcaatagcgtgctgtcgataacttcaccactaggaaccacgttaaccagatattccatcaaattgcttaactcgcgcaggtttccgggccaacgatgcttacgcaatatttcgacgacatcgggagcaatgccaggataaacgcttcccagacgacgggtatgcagatgtaaaaagtaatgcaccaatagttcaatatcttcctgacgttcacgcagcggtggcagagttatcgggataacattaagtcggtagaagagatcttcgcggaatttaccttcggcaatgaactgggccaaattctgattagttgcagaaatgatgcgaatgtcgacttgtattgggctactggcaccaatcggcagaatttcacgtgcctcaatagcgcgcagtaatttagcctgcaacattaatggcatatcacctatttcatcgagaaacagcgtgcccgtattcgccgcctgaatcaaccctgttttaccgttggcagaagcgccagtaaatgcacctttaacataaccgaacagttcgctctccagaagctgctccggaatcgcggcacagttgatagcaataaagggtttattccgtcttccgctcaacttatggattgcacgggcgacgacttctttacccgtgccgctttcaccaaccaccataacgctggatgggctgggtgcaatacggctaatgagtcgttttaattgccgcataacacggcactcgccaaccaattgttcaatatgcggttcatcaggtgcatttgctacagaaaaactggtatggctttggtgaaacgccattaaaaataattgtcggccctgaatgttatgcaattgaccaatgattaattcacttttatcgtcccaactaacaatatgctgcatatgtccatgggtaaaattactctcaaatgttaatggtctgaaacggataggtttcccaataatattattttgcacaacaccaagtgtttttaaggcagtctgattaacaaactgaacccgattttcatcatctacaactaatacgccctgatccatattatcgatcatggtcgcaaatattttactgatgttatctcctggcccctgatcctccagaagtttgctaacaaaaatggtggatatatggcgaacataatcagaaaattcgcgtaaattatcactgatatgctcttgttgctcgtgggtaacggcaatcaaacttatcaccccaacacaacgatcctgtaaaatgacaggcgtacccagaaatgctttttcgcggcaattttctttactatcgcaaccttcgcaaaggggatcgaagcgagactgtgtcacaactttttcagttttcgtttccaggacgtggcggagcaggcgactgttgccgctcaactggcgaccaagaaacttcccatacgcgcccgttccggcaacgcgacacaagttttcatcaacgatctcaacctcaagctgcaaaaacgctggcaagcattctggcaaaacgctgaattgtcggttgaatttgcatcaatacactctgcgtagtagcaagctccatagctttaccttccagacttacttaaaagtcgatcattgaagacgttgatggttcacagatcatgatgatattaactcaggcgaaattggctttgataaaaacataagatttttatcattttctaatgaaattatggaagagatatcacatttctatatcaatatgagaattacggcggtgagtttatcaaactgaagagagatagcctgcccctttatcttatttctgatacttagcagcaaataaataacgcgataaaaaaagccaaacgttttcgtattttacaaacaaccagaagctggcatcaatttgtgatcaaccccacacattatccgtcaaattagtcttttgcagccgcgcggataattctggcacacttattgttagtcccaggtatagctgtgaaaacaccaatcactttggcaagtcacagtgaaataaaccactttgcctgtcattccactaccgggactttatgatgaaaactgttaatgagctgattaaggatatcaatagcctgacctctcaccttcacgagaaagattttttgttaacgtgggaacagacgccagatgaactgaaacaagtactggacgttgccgcagcattaaaagcactgcgtgctgaaaacatcagtaccaaagtctttaatagtggattaggtatttccgtattccgcgacaactccacccgtacccgcttctcttatgcttccgcgcttaacctgctcggccttgcacaacaagatctcgacgaaggcaaaagtcaaatcgctcacggcgaaaccgtgcgtgaaaccgccaatatgatctccttctgcgccgacgctattggtattcgcgacgatatgtatctgggcgcaggcaacgcctatatgcgtgaagttggcgctgcacttgatgacggttacaagcagggtgtactgccacagcgtccggctttagtgaacctgcaatgcgatattgaccacccgactcagagtatggctgacctcgcgtggttacgtgaacactttggtagtctggaaaacctgaaaggtaaaaaaatcgccatgacctgggcctactctccaagctatggcaaaccgctctctgtaccacaaggcatcatcggtctgatgactcgcttcggtatggatgtcaccctggcccatccggaaggctacgacctgatcccggatgtggttgaagtggcgaaaaacaatgctaaagcctccggtggtagcttccgtcaggtcaccagcatggaagaagccttcaaagacgcagacatcgtttatccgaagagttgggcaccttacaaagtgatggaagagcgtactgaattgctgcgtgcgaacgatcacgaaggcttaaaagcactggaaaaacagtgtctggcacagaacgcgcaacacaaagactggcattgtactgaagagatgatggaactgacccgtgatggcgaagccctgtacatgcactgcctgccagctgatatcagcggcgtatcctgtaaagaaggtgaagtgactgaaggcgtattcgaaaaataccgtatcgctacctacaaagaagccagctggaagccttatatcatcgccgcgatgatcctgtcccgtaaatacgccaaaccaggtgcactgctcgagcaactgctgaaagaagcgcaagaacgcgtgaaataacccctcgggccgatcagctggtcggccctctatttccagaggccaaaaggataggatatgtccgttttcagtttgaagattgatatcgccgataacaaatttttcaacggcgaaacaagtccgctctttagccaaagccaggccaaactggcgcgccagttccaccagaaaatagctggttatcgcccaacaccgctttgtgcgctggacgatctcgcaaacctttttggtgtgaagaaaattctcgtcaaagacgaaagtaaacgattcggtctgaacgccttcaaaatgcttggcggtgcgtacgccatcgctcaattattgtgtgaaaaatatcatcttgatatcgaaacgctgagttttgagcacctgaaaaatgccatcggcgaaaaaatgactttcgcgaccaccaccgacggcaaccacgggcgcggtgtggcgtgggcagcacagcaactcggacagaatgcggtgatttacatgccgaaaggttctgctcaggaacgcgttgacgccattctgaacctcggtgccgagtgcatcgtcacggatatgaactatgacgataccgttcgcctgaccatgcaacacgcgcagcagcacggctgggaagtggtacaggacacggcatgggaaggttacaccaaaatcccaacctggatcatgcaaggctacgcaaccctggcagatgaagccgtcgagcaaatgcgtgaaatgggcgtaaccccgacgcacgttctgctgcaagccggtgtcggagcaatggccggtggtgtgctgggttatctggtcgacgtctatagcccgcaaaatctgcacagcattattgttgaacctgacaaagctgactgtatttatcgctccggcgtcaaaggcgacatcgtcaacgttggcggtgatatggccaccatcatggcaggcctggcctgtggcgaacctaacccgctgggctgggaaatcctacgtaactgcgccacccaattcatctcctgccaggacagcgttgccgcattaggtatgcgcgtgctgggtaatccgtacggcaacgacccgcgcatcatctccggtgaatccggcgctgtcggtttgggcgttctcgcagcggttcattatcacccgcaacgtcaaagcctgatggaaaaactggcgctgaacaaagatgccgtggtgctggttatcagcactgaaggcgacaccgacgtgaagcactaccgcgaagttgtctgggaaggcaaacacgctgtagcaccttaatcaccctattggaactgctccctgcaaaacggggagtaaaaaatctggagaaaaataatggctaagaatattccattcaaactgattcttgaaaaagcaaaagattaccaggcggatatgactcgcttcctgcgcgacatggttgctattcccagtgaaagctgcgacgagaaacgcgtagtacatcgtattaaagaagagatggaaaaagtcggcttcgataaagttgaaatcgacccgatgggcaacgttctcggttatatcggccacggcccgcgtctggtggcaatggacgctcatatcgataccgtcggcattggcaacatcaaaaactgggacttcgatccgtacgaaggcatggaaactgatgaactgattggtggtcgcggtacttccgaccaggaaggtggcatggcctctatggtttatgccggtaaaatcattaaagacctcggtctggaagatgaatataccctgctggttaccggtacggtgcaggaagaagactgcgacggtctgtgctggcagtacattattgaacaatccggcattcgcccggaatttgtggtcagtaccgaaccaaccgactgccaggtataccgtggtcagcgcggtcgtatggaaattcgtattgatgttcagggtgttagctgccacggttctgcaccagaacgcggtgataacgccattttcaaaatgggtccgattcttggcgaattacaagaactctcccaacgtctgggttatgacgaattcctcggcaaaggcaccctcaccgtttctgaaatcttcttcacatccccaagccgttgcgctgtagcagacagctgcgcagttagtatcgaccgtcgtctgacccggggcgaaacctgggaaggcgcgctggacgaaatccgcgccctgcctgcagtacagaaagctaacgcggttgtttctatgtacaactacgaccgtccgtcctggactggcctggtttacccaaccgaatgctacttcccgacctggaaagtggaagaagatcacttcaccgttaaagcactggtgaatgcctacgaagggctgtttggcaaagcgccggttgttgataagtggaccttcagtactaacggcgtatctatcatgggccgtcacggcattccggtgatcggctttggcccgggtaaagaacctgaagcgcatgcacctaacgaaaaaacctggaaatctcacctggtgacctgtgccgcgatgtacgctgcaatcccgttaagctggctggcaacagagtaattactcttcacttattcccctccggttcgccggagggtttttggagtttgctatgcgcgtattgatcaaaaacggcactgtcgttaacgcagatggacaagccaaacaggatttgctgattgaaagcgggattgttcgccagttgggcaacaatattagcccgcagctcccgtatgaagaaattgatgccactggctgttacgttttccctggcggcgtggatgtccatacgcatttcaatattgatgtcggcatcgcgcgcagttgtgatgatttttttaccggtacccgcgcagctgcgtgtggcggtacaacaaccattattgaccatatgggatttggcccaaacggctgtcggttacgccatcaactggaggtttatcgtggttatgccgcccataaagcggtcatcgattacagctttcacggtgtgatccagcacattaatcacgcaatcctcgacgaaatcccgatgatagtcgaggaaggactgagcagttttaaactctatttaacctatcaatacaaactcaacgatgacgaggttttgcaggcattacgccgcttgcatgaatccggcgcgctgaccaccgtgcacccggaaaatgatgcggctatcgccagcaagcgggcggaatttatcgccgcagggttaaccgcgccgcgctatcatgccttgagtcgccctctggaatgcgaagcggaagccatcgcccgcatgattaacctggcacaaattgccggtaacgccccgctctatatcgtgcacctgtctaacggcttaggtctggattatctgcgtcttgcccgtgcgaatcaccagccagtctgggttgaaacctgcccacaatatctcctgttggacgaacgcagttacgatacagaagatggcatgaagttcattcttagcccaccgctgcgtaacgtacgcgagcaggacaaactgtggtgtggcatcagcgatggtgcgattgacgtggtggcaaccgatcactgcaccttcagcatggctcaacgcctgcaaatttctaaaggcgatttcagtcgctgcccaaatggcttacccggtgtggaaaaccgcatgcagttactgttttccagtggcgtgatgacgggacgtataacaccggaacgctttgttgaattaaccagcgcaatgcccgccaggttgtttggcctgtggccgcaaaaaggattattagcgcccggttccgacggcgacgtggtgattatcgacccacgtcagagccaacaaattcagcatcgccatctccacgacaacgccgactacagcccatgggagggttttacctgtcagggcgcgattgtcagaaccttatcccgtggtgaaacgattttctgtgacggcacctttacaggcaaagccgggcgaggtcgtttcctgcgacgcaaaccgtttgtccctcccgtgctctaaccactgccagggatctatacacaatcaagaatgatgagtgaggaaaaatgagtaagaaaattgttctcgccctgggcgggaatgcgctgggcgatgacctggccgggcaaatgaaagcggtaaaaattacttctcaggcaattgttgatttaattgcccagggacatgaagttatcgtcactcatggtaacgggccgcaggtgggcatgattaaccaggcctttgaagctgccgcaaaaactgaagcgcacagcccaatgctgccgatgtctgtctgtgttgcattaagccagggttatattggttacgatctacaaaacgctttaagagaagaactgctttctcggggcattaataaacctgtagcaacgctggttactcaggtcgaagtcgacgctaacgatccggcattcctcaacccgaccaagccgatcggtagcttctttaccgagcaagaagcagagcaactgacaaaacagggttacactctgaaagaagatgctggtcgcggctatcgccgtgttgttgccagcccaaaaccggttgatatcattgaaaaagaaacggttaaagctctggtagatgcaggtcaggtggtgatcaccgttggcggtggtggtatccctgttattcgtgaaggtaaccatctgcgtggtgccagcgcggttatcgataaagactgggccagcgcccgtttagcagaaatgattgatgccgatatgctgatcattctgactgcggtagaaaaagtggccattaacttcggtaaagagaatgaacagtggctcgatcgcctgagtttaagtgatgctgaacgctttatcgaagaaggtcattttgcgaaaggttctatgctgcctaaagtggaagctgccgccagctttgctcgctctcgcgcaggtcgtgaagcactgattaccgtattgagcaaagcgaaagaagggattgaaggcaaaacaggaacggtgatttgtcagtaatttaaaggccgggtgggtaataccatccggccaaagattgtcaagtaagtgcgctttgttgatgccggatgcggcgcgagcgccttatccgtcctacaaaacatcgcaaattcaatagattgcaatgcacttgtaggcctgataagcgtagcgcatcaggcaatttggcgtttgtcatcagtctcaggccgggtgggtaataccatccggccattttcatttaagccacttccagcacttcttttgtcgctttcacgccctgatgcatcaacatcattaacgcctcaagtacgccgccgccaatcgcccgggctttatcagaaacgctggtgaaatcagcggtttcaccacgaggatcgatatcaccaattttaaaaccaccaaccactgccaggccgtcgttcaacaagccacgcaccatccccgtcaacggtgctttaatttcatgctcaccaatccaggcaatcacatcgccctctttcaccagatcgcctaatttcacgttggatcgcataatgcctgcagcaggagcacggatcacccgtcgggtggtatgccccataatattgccaggaacaccggtattctcctgcgcacaaccagagtaaatcacctgaccgagccagtgcccgcgatttgtttcaattaccgcatgacaatccttcccagcagtaaagcccggcccaagcgcgattgttactggtgccatatctgcccgcgttcccaaattctgtttcgccagaatagcgtccaccacgcaaagcggtttcagttcatcaagcaaactacaggcgggatctaccatcacaggaatgaatccgcgttcggtaagtttcatcgcttccgcagagctggttgccaggcgagcagtgacgccttcgaccgtcatttcgccatcgaacacggcctgggcaaacgccacggtacaacgaatcactgtcggtttttccacttccagcatgatcactttaaaacccgcatgatacagacgtagcgccacaccactggcgatatctcccgcaccgcgaatcaccaccagctggtgtccggaaggatgagaaggtttcatcatcagcccacccggcgcgttatttttcacctgtaatatttctgccagcacgctgatggcgatctcctgcggcgtttccgcacctatgttgtaaccaacgggcgcatgtaaacgggcaatatgttcttcagccacgcctttctcacgcaattgacgcaggaaaagctgaaccttgcgacgacttgccagcaaccccaaccatgcaatgggctgttcaatgagtttgtcgagggcttcacgatcctgattattcgtggcaatcaggacaaaattatcagggcgaatatccagtgcttccactgccgcaccaaagctctcagcatggagaagcgtggtacttggtgggaatagttcaggattgaggctttcgcgataaatatcagcaacggcaatatcaaatcctaatagcgccgcactctgggctatcgcccggttgacatgccccgcgccaatcaacaccagacgtggacgcataccatggacgctgataaatacactcattgcacctccacaatcactcccgacagcatccgcaccgttacgagccatacgtccatggaataatcgcggcttacgttcctgcaatgcctgaaggctctcttcaatcaccttccgctcaaccattccgccaccaattgtaccgacgatagaaccatcggcgcgcactaacatttgtgcagaatggcggggagtgctgcctcggctatcaacaatttgcgccatagcaaacggacaattttgctcttcgagttttgcagcctctgtgaaaatattcataccaacctcaatggatatcctttcagtaacccggaatacccgggccgttaattcacaaatctgcgcgcgattgcaggatgttcttgtatatcgcccagccagattgcctctacgtcgtgttgttgcagcggttgaaggagctcgctttgtgcaatcgcattctcacattgagaaaaacggttaatgaaccagactcgccgacaaccttgcggtacgtttttaaacgccccctgagggtggcgaaccagcgcaacgagatcgctcagttgcaaggttgcatcaggtgttaacccggtaatatcagcaaactggctccagcgatggacattttctgtgctcactttcgcgcccaaagtatgtcctcccatcacagcaatcacgcagcaactgcttttgggtatgcaaggttcgtgctcatcaggcgcttttaacggcattccacggctgccatctgcttcaatgagaattacgtcacactctggtcgttgcaccagtgcatcaatcgcttctggcgtaaatccctgcacttttccctggttcgctttccagctgtgaaaacaaaaactaatgggggatgtaagagacgcatgaggaagcatggcgggatcacgacagaaaaccacgggccagtgagacgttggcataaacatatgtgtcgtcgtcgtgattaacacacgcctgccgctagcctggagcagttctgccagccaaaaaagcaagctggttttccccccagcaccaacaacagaaatcacagtgggacgtttctgcgcacctaaatcaatgactaatgcgcttgggtcaactatacttttcacgagtctttatgacctctctgggataaattatccccaacttaatccatcaggaagtaacgcaattatcaggcgttattagcccctataaataatggaaccactatgagtgccatcgactgtataattaccgctgccggattaagtagtagaatggggcaatggaaaatgatgttaccctgggaacagggaacaattcttgatacaagtatcaaaaatgcgttgcagttttgtagccgaattattttagtcaccggctatcgtggtaatgaactgcacgaacgttatgcgaaccagagcaatatcactattattcacaacccagattatgcgcagggtttactaacatccgtcaaggccgcagtacccgcagtgcaaacagaacattgttttctcacccacggtgacatgccaaccctcaccatcgatatttttagaaaaatctggagcttacgaaatgatggcgcaatactgccactccataatggcatccccggccatccgattttagtgagtaaaccatgcctgatgcaggcaatccaacgacccaatgtcaccaatatgcgtcaggcactccttatgggagatcattattccgtcgaaatagaaaatgcagaaataattttagatattgatactccggacgactttattacagcgaaggaaaggtatactgaaatttaaaaaacgtagttaaacgattgcgttcaaatatttaatccttccggcactcattatcataatgataaggaatcactgattttgagaaaagagaaaaattgataaatgggctggcaataataattttcaggagtgattttaattctcatttagcacctgtgagttcattcacaaaaagcccttaagtttcgagccgcctcacatttttttatatttcccgccaaacctggcaagagtggtgcgattgttgctctatccccctaaaccaccggatttctcaacaccggtcactcaatgatatctgtataagctaaggagagggttatgggggatattatgcgtcccattccgtttgaggaacttttgacgcgcatatttgatgaataccaacaacaacgcagtatctttggtattcccgagcaacagttttacagtcctgtaaaaggtaaaactgttagcgtcttcggtgaaacctgtgccactcccgtcggccctgccgctggcccgcacacgcagctcgcgcaaaatattgtcacttcctggctgactggcggacgcttcatcgaactaaaaaccgtccaaattcttgaccgcctggagctggaaaagccctgtatcgatgccgaagacgagtgctttaacaccgaatggtctaccgagtttaccctgcttaaagcctgggatgaatacctcaaagcctggtttgccctgcaccttctcgaagcgatgttccagccttctgattccggtaaaagcttcatctttaatatgagcgtcggttacaacctcgaaggtattaagcaaccgccgatgcaacagttcatcgacaatatgatggacgcatctgaccatccgaaattcgctcaatatcgcgatacgctgaataaattactccaggatgacgcatttttagctcgccacggattgcaggaaaaacgcgaaagcttgcaagccttacccgctcgcatccccaccagtatggtgcatggcgtcaccctctccaccatgcacggctgtcctccgcatgaaatcgaagccatttgccgctacatgctggaagaaaaagggctcaacacctttgtgaaacttaacccgaccttactggggtacgcgcgtgttcgtgagatcctcgatgtctgcggtttcggttacataggcttaaaagaagagagttttgatcacgacctcaagctgacgcaagcactggaaatgctggaacgcctgatggcactggcaaaagaaaaaagtctcggctttggcgtaaaactgactaacactctcggcaccatcaacaataaaggcgcactgcctggtgaagagatgtatatgagtggccgtgcgctgttcccgctctccatcaatgttgcagcagttctctctcgcgcctttgacggcaaactgcccatttcttattccggtggtgccagtcagctgactatccgcgatatttttgatacaggtattcgccctattactatggcaaccgacctgctgaaacctggcggctatctgcgcttaagtgcctgcatgcgcgagctggaaggctccgacgcctggggacttgaccatgttgacgtcgaacgactgaacagactggcagcagatgcgttaaccatggaatacacccagaaacactggaagccagaagagcgtattgaagtggcagaagacctgccgctgaccgactgctacgttgccccctgtgttactgcctgcgctatcaagcaagatattccggaatacatccgtctgcttggcgaacaccgctatgccgacgcgctggaactcatctaccaacgcaacgctctgcccgccattaccggtcatatttgcgatcaccagtgccaatacaactgtacccgcctggattacgacagtgcgctgaatatccgcgaactgaaaaaagtcgcgctggaaaaaggttgggatgaatataagcaacgctggcacaaaccagccggttctggtagtcgccatccggttgccgtgattggtgcaggtccggcgggtctggcagcaggttacttccttgccagagcgggccatccggttacgctgtttgaacgcgaagccaatgcgggcggcgtggtgaaaaatatcattcctcagttccgtattcctgcagagttaattcagcacgatatcgattttgttgccgctcacggcgtgaaatttgagtatggctgcagtcccgatttaaccattgagcagttaaaaaatcagggcttccactatgttctgattgccaccggcactgataaaaatagcggtgtgaaactggcgggcgacaaccaaaatgtctggaaaagtctccccttcctgcgtgaatacaacaagggtacagcgctcaagctgggcaaacatgtggtcgttgtcggggcgggtaacaccgcaatggactgcgctcgtgcggcgttacgcgttccaggcgtagaaaaagcaacgatcgtttaccgtcgtagtctacaagagatgcccgcatggcgcgaagagtatgaagaagcgttgcacgacggcgtagagttccgtttcctgaataatccggaacgtttcgatgctgatggcaccttaaccttgcgcgttatgagccttggcgaaccggatgagaaaggtcgtcgtcgtccggttgaaaccaatgaaacagtaacactgcttgtagacagcctgatcaccgccattggtgaacagcaggatactgaagccctgaatgcgatgggcgtgccgctggacaaaaacggctggccagacgtcgaccataatggcgaaactcgtctgactgacgtctttatgatcggcgacgtacagcgcggaccatcctccattgtcgctgctgtcggaaccgcgcgtcgggcgaccgatgccatccttagtcgggaaaatatccgttcccaccagaacgataaatactggaacaacgtcaatccagcggaaatctatcaacgtaaaggcgatatctctatcacgctggtgaacagtgacgatcgtgacgcgtttgtcgcccaggaagccgctcgctgcctcgaatgtaactacgtttgcagcaagtgtgtggatgtctgcccgaaccgcgccaacgtctccattgcggtcccaggcttccagaaccgtttccagacgctgcacctcgacgcttactgtaacgaatgcggcaactgcgctcagttctgtccgtggaacggtaaaccgtacaaagacaaaatcaccgtcttcagcctggcgcaagactttgataacagcagcaacccaggcttccttgtggaagattgccgggtacgagtacgtctgaataaccaaagctgggtgttaaacatcgacagcaaaggtcagtttaacaacgtaccaccggagctgaacgatatgtgccgcatcatcagccatgtccaccagcatcatcattatctgctgggccgcgtggaggtgtaatcatgttgattctgaagaatgtcactgcggtacagctacacccggcaaaagtgcaggaaggcgttgatatcgccatcgaaaacgatgtgattgtcgctatcggcgatgccctgacgcaacgctaccccgacgccagcttcaaagagatgcatggccggattgtgatgccagggattgtctgcagccacaaccatttttacagcgggctttcccgcggaattatggcaaacatcgcccctttgcccggatttcatcagtacgctgaaaaatctctggtggcggctcgatcgcgcccttgatgaagagagcctctattacagcggactgatttgttccctggaagcgattaagagcggatgtacaagcgttatcgatcaccatgcctctccggcgtatatcggcgggagactctccacattgcgcgacgcatttttaaaagttggcctgcgcgcgatgacctgttttgaaactactgaccgtaacaacggcatcaaagagttgcaggaaggtgtagaagaaaacatccgtttcgcccgtttgattgatgaggcgaagaaagcgacaagcgagccgtatctggtggaagcacatatcggtgctcacgcgccgtttaccgtgccggatgccggtctggagatgctgcgtgaagccgtgaaagccacaggccgtggtttgcatattcacgctgcggaagacctttacgacgtttcctacagtcaccactggtacggcaaagacctgctggcacgactggcgcaattcgatctcatcgacagcaaaacgctggtcgctcatgggctgtacttgagcaaagatgacatcaccctactcaatcagcgcgatgcgttcctggtgcataacgcccgtagtaacatgaacaaccatgtcggctacaaccatcaccttagcgacatccgcaatctggcgttgggaacggacggcattggtagcgacatgtttgaagagatgaaatttgccttctttaaacatcgcgatgcgggtggtccgctgtggcctgacagttttgccaaagccctgactaacggtaacgaactgatgagccgcaactttggcgcgaaatttgggcttctggaagccggttacaaagctgatttaaccatttgcgattacaacagcccgacgccgctgctggcagacaatatcgccgggcatatcgctttcggtatgggcagtggcagcgttcacagcgtgatggtcaatggtgtgatggtctatgaagaccgtcagtttaacttcgattgcgattccatttatgcacaagccagaaaagccgctgccagtatgtggcgtcggatggatgcgctggcataaatgacagatgccctcttcccgcagggaagagggttaaataaggaaagaagatgattgaacaatttttcaggcccgactctgtcgaacaggcgctggaactgaagcgccgctaccaggatgaagccgtctggttcgccgggggcagcaaactcaatgctacaccaacccgtaccgataaaaagattgccatttccttacaggatctggaactggactgggttgactgggataacggtgcactgcggattggcgcaatgtctcgcttgcagccactgcgtgatgcgcgatttattcctgcagcgctgcgtgaagccctcggttttgtttacagtcgccatgttcgtaatcagagcaccattggtggtgaaatcgccgcccgccaggaagagagcgtgctgcttcccgtcctgttggcactggatgctgaactggtttttggcaacggcgaaacgctgagtatcgaggactacctggcctgcccatgcgatcgcctgctaaccgaaattatcattaaagatccgtatcgcacctgtgcgacccgcaaaattagccgttctcaggcaggtttaaccgtcgtgacggcagccgttgcaatgacagaccacgacggtatgcgaattgcgctggatggcgtcgccagtaaagcactgcgtctgcatgatgtcgaaaaacaaaatctggaaggcaatgcacttgaacaggctgtcgccaacgccattttcccgcaggaagatttgcggggcagcgtggcctataaacgctatatcacgggagttctggtagccgacctgtatgccgactgccaacaggctggggaggaagccgtatgatcatccactttactttaaatggcgcgcctcaggagctaaccgttaatccaggcgaaaacgtgcaaaagctgttgtttaacatgggaatgcactctgtacgcaacagtgatgatggtttcgggtttgccggttctgacgcaataatctttaacggtaatatcgttaacgcgtccttgcttattgccgcacagttagagaaggcagatattcgtaccgcagaatctctgggcaaatggaacgagttaagtctggttcaacaggcaatggttgatgttggcgtggtgcagtctggttataacgatccagctgcagctctgattatcaccgatcttctcgatcgcatcgccgcacctacccgcgaagagatcgacgacgcgctttctggtttgttcagccgcgatgctggctggcagcaatactatcaggtcattgaactggcggttgcacgtaaaaataatccgcaggccaccattgatatcgctccgactttccgtgacgacctagaagtcattggtaagcattatcctaaaactgatgccgcgaaaatggtgcaggcgaaaccctgctatgttgaagaccgcgtaacggctgacgcctgcgtcattaaaatgttacgtagcccacacgctcacgcactgattactcatctggatgtcagcaaagctgaagccttaccgggcgtcgttcacgttattactcacctgaattgcccggatatctactataccccgggtggtcagagcgcaccggaaccgagtccgcttgaccgccgtatgttcggcaagaaaatgcgtcacgtcggcgatcgtgttgctgcggtcgtcgcagaaagtgaagaaattgcgctcgaagcactgaagctcatcgacgttgaatatgaagtgcttaagccggtaatgagcatcgacgaagcaatggcggaagatgcgcctgtcgtgcacgatgaaccggtggtgtatgttgctggtgcgccagatactctggaagacgataacagccatgcagcccagcgcggcgagcatatgatcatcaacttcccgatcggttctcgccctcgcaaaaatatcgccgccagtattcatggtcatattggcgatatggacaaaggctttgccgatgccgatgtgatcattgagcgaacctataacagtacgcaagcgcagcagtgcccgactgaaacacatatctgctttactcgtatggacggcgatcgtctggttatccacgcctccacccaggtaccatggcacttacgccgccaggtcgcgcgcctcgtgggcatgaaacagcataaagttcatgtcattaaagagcgagttggcggcggttttggttccaaacaggacatcctgctggaagaagtgtgcgcctgggcaacctgcgtgaccgggcgtccggtactgttccgctacacccgtgaagaagagtttattgctaacacctctcgtcacgtcgcgaaagtcaccgtcaaactgggagcgaaaaaagatggtcgcctgacggcagtgaagatggatttccgcgccaacactggcccttacggcaaccacagtctcaccgtaccgtgtaacggaccggcgctgagcctgccgttatatccgtgcgataacgtcgatttccaggtcaccacctactacagcaacatttgcccaaatggtgcttatcagggttatggcgcaccgaaaggtaacttcgctatcaccatggcattagcggaactggctgaacagttacagatcgaccaactggaaattatcgaacgtaaccgggtacacgaagggcaagagctgaaaattctcggtgcaatcggtgaaggtaaagcgccgacctccgttccttccgccgccagctgtgcactggaagagatcctgcgtcagggtcgcgagatgatccaatggagcagtccgaaaccgcaaaatggtgactggcacatcggtcgcggcgtcgccattatcatgcagaaaagcggtatcccggatatcgatcaggctaactgcatgatcaaactggaaagcgacggcacctttatcgttcattctggcggtgcggatattggtactggtctggatactgtagtgacgaaactggcagcagaagtgctgcactgcccaccgcaggacgtgcatgttatctccggtgataccgatcatgcgttgtttgataaaggcgcatatgccagctccggtacttgcttcagcggtaacgcggcgcgtttggcagcggaaaatctacgggagaaaattctgttccacggcgcgcaaatgttgggtgagccagtggcagatgttcaactggcaacgccgggcgtcgtgcgcggcaagaaaggcgaagttagtttcggggatattgcccataaaggcgaaaccggcaccggctttggtagtctggtgggaactggcagttatatcacgcctgatttcgccttcccgtatggcgcaaacttcgctgaagttgccgtcaacacgcgtacgggtgaaatccgcctggataaattctacgccttgctggactgcggtacaccggtcaatccagagttagcgttgggacaaatctacggtgccaccctgcgtgctatcggccacagtatgagcgaagagatcatttatgacgccgaaggtcacccgttaacgcgtgatttacgcagttacggcgcaccgaaaattggtgacattccgcgtgatttccgcgctgtgctggtgccgagcgacgataaagtcggcccgttcggggcgaaaagcatcagcgaaatcggtgtaaatggcgcagctccggcgattgctaccgcaattcacgatgcatgcggcatctggttacgcgaatggcatttcacaccggagaaaatactcactgcgctggaaaaaatataaataataaatggccgcttcggcggcctgtttctctgtttgaacgatgactaaatagtgactgcgaaaatgagataagccgttctcaaggcgtcctgcgccccaaattcgtgggaatttattttactaattcagatgatcaaatttactttaaaaggagtgaagggatgtctgatataaaccatgcaggttctgaccttatatttgaactggaggatcgccctccctttcatcaggctctcgttggtgccattacccatctgttggcaattttcgttccgatggtaacccccgcgttaatcgtgggtgcggccttacagctttccgctgaaacaactgcctatcttgtttctatggcgatgatcgcctctggtattggtacctggttacaagtaaaccgctacggcatcgtcggttctggcctactcagtattcagagtgtcaattttagttttgttacggtcatgattgcgctgggcagcagcatgaaaagcgacggttttcacgaagagttaatcatgagcagccttctcggcgtctccttcgttggcgcatttctggttgtcggatctagttttatcttgccctatttacgtcgggttattacgcctaccgtcagcggtattgtggtactgatgatcggcttaagcctgattaaagtcggcattatcgattttggtggaggatttgcagccaaaagcagcggtacgttcggcaattacgaacatctcggcgttggtttattggttttaattgtggtgatcggctttaactgctgtcgcagtccgttgctacgcatgggagggatcgccattgggctatgtgtcggctatatcgcaagcttatgcctgggcatggtggatttcagcagtatgcgcaatttgccgttaatcaccatcccgcatccgttcaaatacggctttagttttagcttccatcagttcctggtggttggcacgatttatctgcttagcgtgctggaagcagtcggcgatatcaccgccacggcaatggtttcccgccgccccattcagggggaagagtatcagtcccggctgaaaggcggcgtgctggcagatggtctggtttctgttatcgcctccgctgtcggtagtttaccattaaccacgtttgcgcaaaataatggggttattcagatgactggcgtcgctagtcgttatgtcgggcgaaccatcgcggtaatgctggttatcctcggcttatttccgatgattggcggcttcttcacgaccattcccagcgcagttctgggaggcgcaatgacgttgatgttttccatgattgccatcgcagggattcgcatcatcatcaccaacggtttaaagcgccgtgaaacacttattgtcgccacttctttaggtttagggcttggcgtctcctacgatcccgaaatttttaaaatattgccagcctctatttatgtattagttgaaaaccctatttgtgctggcgggttaactgcgattttattaaatattatcctccctggtggctaccgacaggaaaacgttctgcctggtattaccagtgcggaagagatggattaacagtaaaggagtcaatgatgagtggagaacacacgttaaaagcggtacgaggcagttttattgatgtcacccgtacgatcgataacccggaagagattgcctctgcgctgcggtttattgaggatggtttattactcattaaacagggaaaagtggaatggtttggcgaatgggaaaacggaaagcatcaaattcctgacaccattcgcgtgcgcgactatcgcggcaaactgatagtaccgggctttgtcgatacacatatccattatccgcaaagtgaaatggtgggggcctatggtgagcaattgctggagtggttgaataaacacaccttccctactgaacgtcgttatgaggatttagagtacgcccgcgaaatgagcgcgttcttcatcaagcagcttttacgtaacggaaccaccacggcgctggtgtttggcactgttcatccgcaatctgttgatgcgctgtttgaagccgccagtcatatcaatatgcgtatgattgccggtaaggtgatgatggaccgcaacgcaccggattatctgctcgacactgccgaaagcagctatcaccaaagcaaagaactgatcgaacgctggcacaaaaatggtcgtctgctatatgcgattacgccacgcttcgccccgaccagttctcctgaacagatggcgatggcgcaacgcctgaaagaagaatatccggatacgtgggtacatacccatctctgtgaaaacaaagatgaaattgcctgggtgaaaagcctttatcctgaccatgatggttatctggatgtttaccatcagtacggcctgaccggtaaaaactgtgtctttgctcactgcgtccatctcgaagaaaaagagtgggatcgtctcagcgaaaccaaatccagcattgctttctgtccgacctccaacctttacctcggcagcggcttattcaacttgaaaaaagcatggcagaagaaagttaaagtgggcatgggaacggatatcggtgccggaaccactttcaacatgctgcaaacgctgaacgaagcctacaaagtattgcaattacaaggctatcgcctcagcgcatatgaagcgttttacctggccacgctcggcggagcgaaatctctgggccttgacgatttgattggcaactttttacctggcaaagaggctgatttcgtggtgatggaacccaccgccactccgctacagcagctgcgctatgacaactctgtttctttagtcgacaaattgttcgtgatgatgacgttgggcgatgaccgtagcatctaccgcacctacgttgatggtcgtctggtgtacgaacgcaactaataataaaactttaacatcctcgtgaggacatcattatgtctggagacatcctacaaacaccggacgcaccaaagccacagggcgcgctggataattattttaaaattaccgctcgtggcagtaccgttcgtcaggaagtactggctggcttaacgacctttctggccatggtttattccgttatcgtcgttccgggaatgctgggcaaagcaggttttcctcccgcagctgtgtttgttgccacctgtctggtcgcgggcttcggcagcttgctgatgggattatgggctaatttgccaatggcgattggttgcgcgatttccttgacggcgtttaccgcattcagtctggtactcgggcaacaaattagcgttcctgtcgcactgggcgcggtatttctgatgggcgtcatcttcaccgccatttccgtaaccggtgtgcgtacctggatcttacgtaatttgccgatgggtatcgctcacggtacaggtatcggtatcgggctgtttctgctgctgattgctgctaacggtgtgggtatggttatcaaaaacccgattgaaggcttgccagtggcgctcggtgcgtttacctccttcccggtgatgatgagcttgctggggctggcggtcatcttcggcctggagaagtgtcgcgtacccggcgggatcttgttggtgattattgcaattagcatcatcggcttaatctttgacccagcggtgaaataccacggtctggtggcgatgccaagcctgactggcgaagatggtaagtctctgattttcagcctcgatattatgggtgcactccagccaactgtacttccgagtgtactggcattggtgatgaccgcagtgttcgacgctactggcaccatccgtgccgtcgccggtcaggcgaatttgttggataaagacaaccagatcatcaacggcggcaaagccctgaccagtgacagtgtaagtagtatattctccggcctggtgggcgcagcgcccgcagcggtttatatcgaaagtgcggcaggaaccgccgccgggggtaaaacaggtttaaccgcaaccgtagtgggggcgttattcctgttaattctgtttttaagtccgctgagttttttgatccctggttacgccactgcacccgctctgatgtacgtaggtttgctgatgttaagtaacgtcagcaagctggatttcaatgattttattgacgctatggctggcctggtgtgtgccgtgttcatcgttctgacttgtaatatcgttaccggtattatgctgggctttgtgacactggtcgtaggccgcgtctttgcacgcgaatggcaaaagctgaatattggtacggtgatcattactgccgcactggtcgcattttacgcgggtggttgggcaatctaatagattctccgcgcctttcagcgcggagatttctttcagagaggattctcaccgctggcaacaatacgctgctggcggactcgcctgagttctctttcagtaagcaactgcagcgcctgtgttgggcaagattcaacgcaggctggcccctcttcccgctgttcacagagatcgcatttcacaatttgttgtcgggtatcccccggcaagctctgaatggtgatcattccaaacgggcacgcactgacgcaactctgacagccaatacaacgggcagaattggtctgcaccacctgctcgcccatcgtcagcgcccccacggggcaagcgccaacacaaggggcgttttcacactgatggcacatcaccggcgcactgatgctgtccagtcgctgtaccttcagccggggtaaaaagacatcggcattcaactcctgttcactagggtgagcgaccacacaggctacttcacaagtacggcagccaatacagtcagccggattaacgataattaagcttttcatcagcttgccttcgtatcaaacagagttaacatatcgcgcgccgcctgccttcctgcggccattgcagtgacaaccagatccgcgccatgaactgcatcaccaccagcaaagacttttttcagatgcgtctgggtaggtaaatacccgacgtcaccggtttgaatcaggccccatttatcgagtttaattccgctgccctgcaaccacggcatggcatgcgcctggaaaccaaaggccataatcagaacatcggcgggcaattcaaactcactacccgctaccggacgaggacgacggcgaccatccggccccggctcacccatggcggtacgaatcaggcccaccgcagttaaacgcccatcttcgtcacaagcgatatattgcggttgaacattgaactgaaactcgacaccttcctcgcgcgcattaaccacctctttgcggctgcccggcatactgacttcatcacgacgatacgcgcaggtcacgctggcggcattgaggcggatggaagtccgcaaacaatccattgtcgtatcgccaccgcccaataccacgactcgcttaccttccacgtccgtcagcggatactcttcagactccggcaatcccatgagctggcgggtatgggcagtcaggaacggtagagcctgaatgacaccgggcgcatcttcatgcggcagatctgctcgcatcatcccgtaagtccccacgccgatgaaaactgcatcatattcagaagttaaatcgctaaaggtaatatcgcggccaatttcacagttaagatgaaagtcgattcccattgcggtgaatatctctcgccgctggcttaataccgttttatcgagtttgaaaggaggaatgccaaaagtcagcataccgccaatttctggatggcgatcaaagacatcgacctgaactcctgcgcgcgccagaatatcagcacaccctaaccctgcaggcccagcgccaatcaccgccactttttcgctacggggaacaactttgctgacatcgggacgccaacccatcgccagcgcggtatcggtgatgtagcgttccagattaccgatagagactgcgccgctgtgatctttcaaagtacatgcgccttcacaaagacggtcctgtggacataccctgccgcaaatttctggtaaggaactggtctggtggcaaagttctgccgcttcaataatctttccttcctgtaccagacggatgtaatccggaatagcgttatgcagcgggcaatgccagttgcagttagctttttcggcacaataaacacagcggtcactctcataagtcgcttgttgtggatccagcccgcaatatatttcgccaaagtgggttttccgttcactcgcactaattttatctgcgcctttacggctgttaacggggagcaacgctgcactgcgagatggctgagcgtcactactcgcttttcctgctgccgttttgcgctggcgggccacctttatctgctgcaaccctttatcgtccatcagtcgtaacgcctgtgttgggcaaacttcaatacaggcttgcgtgccggaactgcgctggttacaaaggtcgcatttctgcgcaatcgtatcgaccatctcaacgacgccaaaggggcaagcgattgcgcatcttttacaaccaatacatttttgctcgtccagttgtacgctatcggactggaaagtcagagcattaaccggacaagccgtaacgcaaggggcattgttgcagtgatggcaggccaccggattcgcagcctggcctttccctacaacgtggatacgcggtcgaaagtcactgtgactcagcggccagttttcttgattgtgtgccaccgcacaggcaatttcacaagcatgacagcctatacattccgcagcttcagcagcaataaacttattcatttgcatccctttcatttaatgagttatgtcttctcaaatttcgcgatgcaataaacgggcatatattaggtagcatgaccgttttaattataattttgcgactgagttcaaattattgcccctcaatctatgccgctttcattatttcaacattgccgatcaaaagagcgctatccagataaaaacgattaaatgcgagagtgcgacatgccagaatgattaatgaaatatcaatatgagaaaattacagataattccattgtcaggttctcttctcattttcgtggtttaaccacgattatgtgattgcctccgcaattcctgtctctaactccccttcctcgcaaaaactggcactccacgagcatgtgtttagacagtttcattaacgtaaacggttgctttttactctggcgggcgaaaggagaaacactgatgagcgccatagattcccaacttcccagttcttctgggcaagaccgcccaactgatgaggttgaccgcatattaagtccaggaaagctgatcatactcggtctgcaacacgtccttgtcatgtacgcaggtgcagtcgctgttcctcttatgattggtgaccgactgggcctcagtaaagaagctattgcgatgctcattagcagcgatctcttttgctgcgggatcgtcacattattgcaatgtatcggtatcggccgctttatggggatccgcctgccggtgattatgagcgtgacctttgctgctgtaacaccaatgatagccattgggatgaacccggatatcggcctgctggggatatttggtgccactatcgccgcgggttttatcaccacattattagcgccacttatcggtcgcttgatgcctttattcccgccactggttaccggtgtggttattacttctatcgggcttagcatcattcaggtgggtattgactgggccgccggaggtaaagggaatccgcaatatggtaatcccgtttatttaggtatctcctttgccgtcttaatttttatcttgctcattactcgctatgcgaaaggatttatgtccaacgtcgccgtattactggggattgtatttggctttttacttagctggatgatgaatgaagtcaatttatccgggctacatgatgctagttggtttgcgattgttacgccgatgagctttggtatgccgattttcgatcccgtttccattctgaccatgactgccgtgttaatcatcgtgtttatcgagagtatggggatgttcctggcactgggtgaaatagtcggtcgtaaactctctagccacgatattattcgcgggctgcgtgtcgatggcgtagggacaatgataggcggcacgtttaacagcttcccccacacgagtttttctcaaaacgttggcctggttagcgtgacgcgcgttcatagccgctgggtgtgtatttctagcggaattatattaatcctgtttggcatggtgccaaaaatggcggtgctggtagcctccattccgcaatttgtgctgggcggcgctggtctagtgatgttcggcatggtactggcgacagggattcgaattctgagccgctgtaactacaccaccaaccgttacaacctctatattgtggcgatcagtctcggcgttggcatgactccgacgctctctcacgatttcttttctaagttaccggccgtactgcaaccgctgctacatagcggcattatgctcgcaacccttagcgccgttgtgctgaacgtcttctttaatggctatcagcatcatgctgacctggtgaaggaatccgtctctgataaagatttaaaagtcaggacagtacgtatgtggcttctgatgcgcaagctgaagaaaaatgagcatggagaataatatgaattttttaatgcgcgctatattcagtctgttgttgctttttactctctctattcctgtcatttctgactgtgttgcaatggccattgaaagtcgcttcaaatatatgatgctacttttttaaatggtttttacctgtcggcatccgctcaaaacgggcggttgtcgataaacgctcacttggttaatcatttcactcttcaattatctataatgatgagtgatcagaattacatgtgagaaattatgcaaacggaacacgtcattttattgaatgcacagggagttcccacgggtacgctggaaaagtatgccgcacacacggcagacacccgcttacatctcgcgttctccagttggctgtttaatgccaaaggacaattattagttacccgccgcgcactgagcaaaaaagcatggcctggcgtgtggactaacagcgtttgtgggcacccacaactgggagaaagcaacgaagacgcagtgatccgccgttgccgttatgagcttggcgtggaaattacgcctcctgaatctatctatcctgactttcgctaccgcgccaccgatccgagtggcattgtggaaaatgaagtgtgtccggtatttgccgcacgcaccactagtgcgttacagatcaatgatgatgaagtgatggattatcaatggtgtgatttagcagatgtattacacggtattgatgccacgccgtgggcgttcagtccgtggatggtgatgcaggcgacaaatcgcgaagccagaaaacgattatctgcatttacccagcttaaataaaaaaaccccgacatttgccggggttgtgagcataacgtaatgcttattttaccggacgcatcgccgggaacagaataacgtcgcggatggtatggctgttggtgaacagcattaccatacggtcgataccaattcccagacctgctgtcggcggtaagccatgttccagtgcggtgacgtaatcttcatcgtagaacatcgcttcgtcgtcacctgcgtctttcgcggcaacctgatccaggaagcgttgcgcctgatcttccgcgtcattcagctcgctaaagccgttaccgatttcacgaccaccaatgaagaactcaaagcggtctgtgatttccgggttaacgtcgttacgacgcgccagcggagaaacttctgccggatattcagtaatgaaggtcggctgaatcagatgtgcttctgccacttcttcgaagatctcggtaacgatacggcccagaccccagctcttctcaacgtggatgccgatagattcagcaattgctttcgcagagtcgaagttgtccagatccgccatgtcggtttccgggcgatatttcttgatcgcttcacgcatggtcagtttttcgaacggtttaccgaagtccagcgtcacgtcgccgtaggtcacttccgtcttaccgagaatatcctgtgccagagtacggaacaggctttcggtcagctcgatcagatctttgtaatctgcgtaagccatgtagagttccatcatggtgaactctgggttatgacgtacggaaataccttcgttacggaagttacggttgatttcgaatacacgctcgaagccaccaaccaccagacgcttgaggtacagttccggcgcgatacgcaggtacatgtcgagatccagcgcgttatggtgggtgataaacggacgcgcagcggcaccgccagggatcacctgcatcatcggcgtttcaacttccataaagccgcggttcaccatgaactggcgaataccagagaggatctggctgcgcactttaaaggtgttgcgggattcatcgttggagatgagatcgagataacgctgacgatagcgcgcttcctgatcctgcaagccgtggaatttatccggcagcggacgcagtgctttggtcagcagacgcaactcggtgcagtggatagacagttcgccggttttggttttgaacagcttacctttcgcgccgaggatgtcgccgaggtcccattttttgaactgctcgttataaacgccttccgggagatcgtcacgggcaacgtacagctgaatgcgaccgccaacgtcctgcagggtaacgaaagacgctttacccataatacgacgggtcatcatgcggccagcaacggcgacttcgatgttcagcgcttccagttcttcgttctctttgccgtcgaattctgcgtgcaattggtcagaggtatgatcgcgacggaaatcgttcgggaaggcaatcccctgctcgcgcaggttcgccagcttctcacgacgcgttttcagttcattgttaagatcgactaccgcgtcagcgccctgtgcgtgttgttcagacatgttggttcctcataaccctgctttcaaacttgcttcgataaattgatccaggctgccgtccagcacggcctgcgtgttgcgggtttctaccccggtgcgcagatctttaatgcgggagtcatcaaggacataagaacgaatctggctgccccagccgatgtcggatttgttatcttccatcgcctgtttctcggcatttttcttctgcatctccagttcataaagcttcgctttcatctgcttcatggcctgatctttgttcttgtgctgggaacggtcgttctggcactgggtcacgatcccggtcgggatgtgggtaatacgcaccgcagattcggtacggttaacgtgctgaccgcccgcgccggacgtgcgataaacgtcaatgcgcagatccgccgggttgatttcgatatcaatatcatcatcaacttccggataaacaaacgcggagctgaagctcgtgtggcgacgaccgccggagtcaaacgggcttttacgcaccaggcggtgaacgccggtttctgtacgcagccagccgtaagcgtaatcgccggagattttgatcgtcacggatttaatacccgccacttcaccttcgctctcttcgatgatttcagttttgaaaccacggctttctgcccagcgcagatacatacgctcaagcatgctcgcccagtcctgtgcttccgtaccgccagaccccgcctgaatatcgaggtagcagtcggcgctgtcatattcgccagagaacatacggcggaactcaagctgcgccagtttttcttccagggcgtcgagttcagcaacggcttcgttaaaggtttcttcgtcgtcagcttctacagccagttccagcagaccagaaacatcttccagcccctgtttcatttggtcgagggtgtcgacaacggcttcgagggaggaacgctctttacccagcgcctgtgcgcgttcgggttcgttccagacatccggctgttccagctcggcgtttacttcttccagacgctctttcttggcgtcgtagtcaaagataccccctaagaacgtcggagcgttccgtgaggtcctgaatgcgattatttaccggattaatttcaaacatggtctgatttcttttattgagctagtcaaaatgcggtgataagagcgggattgtacccaatccacgctcttttttatagagaagatgacgttaaattggccagatattgtcgatgataatttgcaggctgcggttgccgcgaaactcgttgatatcgagcttataagccagttgcacttcgcgcacgccgttatccggccagagggcggtatcgacattaaaagcaataccatccagcagtggaccgccgccgaccggttcgaccatcaccttcaaatgacgttcgcccaccagccgctgttgcagcagacggaaatgaccgtcaaacagcggctccgggaacatctgcccccacgggccagcatcgcgcagcagctgcgccacttccatggtcatttcggccgggcttaacggaccgtcacttaccacttcgccttgcaataggctagggtccagccactcagtaaccagttcgccaaaccgttgttgaaagagtttgaatttatcctcttccaggctcaaacccgccgccatcgcatgaccgccaaacttcagcatcatgccagggtagagtgtgtctaatcgctccagcgcatcacgcatatgcagcccctgaatggagcgaccggaacctttcagcgtaccgtcacctgctggcgcaaacgcgataaccggacggtgaaaacgctctttgatgcggctagccagaataccgacaacgccctgatgccattcggggtgatacattgccagcccgccgggtagcgtgtcacggctgcgctccagtttctcgcacagggtcagggcttcaatttgcattccttgttcgatctcttttcgcgtctggtttagcgcatcgagttcatttgccagcacgcgcgcttcgccgatgttgtcgcacaacaacagcgccacaccgacggacatatcgtccagtcgtccggcagcattgagacgtggccccagcgcaaaacctaaatcgctggcggcgagtttttgtgcatcacggtttgccacttcaagcagcgctttaatccccggacggcactttccggctcggatgcgactcatcccctgccaggtcagaatgcgattattagcgtccagcggcacgacgtccgccactgtccccagcgcgaccagatccagcagttctgccaggttaggaattgcgatgttacgctcatcaaaccagccctgatcgcgcaaaaaggtgcgcagcgccagcatcagataaaacgccacacccacgcctgccagacttttgctcgggaaattacagtcgcgcaagttagggttaatgatcgcttccgctgcgggtaatgtgtcgcctggcaaatggtgatcggtaacaataaccgggatgcccaagctgcgagcgtgctcaacccccgcatgggaggaaataccgttatccaccgtgacaattaactgcgcgccacgggcatgggcctgatcgaccacttccgggcttaagccgtaaccgtcttcgaaacggtttggtaccaggtagtcgatattgctgcaaccaaggctgcgcatcgccagcacgcttagagccgtgctggtcgcgccgtcggcgtcgaaatcaccgaccacaataatccgcgttccttcgcgaaaagcgttgtaaaggatctcaacggccttttcgacgccgctcagttgctgccagggcagcatacctttaacactgcgttccagttcttgcgcactgcgtactccccggctggcgtataaacggcgcagcaagggaggcaattcagcgggcaagtctgccgtttcatcgacttcacggcgacgaagttgtatctgttgtttcacgcgaattatttaccgctggtcattttttggtgttcgtcgaggaattctttcatctctttcggcggctggtaacccggaacaagtgtgccattgctcagcacaactgccggagtaccgctaacgccaagctggacgccaagtgcgtaatggtcggcaatatccacgtcgcaactggctggtgcgacgcttttacctgccatcacatcatcaaacgctttgtttttatctttcgcacaccagatagctttcatttctttctctgcatcgctgtccagcccctggcgcgggaaagcaagataacgcacggtgatccccagcgcgttgtagtctgccatttgctcatgcagtttgtggcagtaaccacaggtaatatcagtaaacacggtgatgacgtgtttttcctgcggcgctttataaacgatcatctctttttcaagcgcattcaactgctttaacagcatcttattggtgacattgaccggagccgtgccactaacgtcatacattggcccctgaatgatatgtttaccatcatcggtgatgtacaacacgccgctgttagtcagaactgtcttcatgccagctacaggcgcgggctgaatatcgctgcttttgatgcccattttggctaacgtttgttgaattgccgcgtcatcagcctgagcaaagccactaaacgccgctaacaaagtaaacaacataaaacctttcttcataaatcttcccgttcttttcagacatcacgcccgcgggtgatgctgttgatgaagttgccgcagacgctcggtagcgacatgcgtataaatttgcgtggtggagagatcgctgtggcccagtagcatctgcaccacgcgtaaatccgcaccatgatttaataaatgagtggcaaaagcgtgacgcaacacatgcggactcagcttttcgctgtcgatacccgccagcacagcataatgtttaatacggtgccagaaggtctgtcgcgtcatctgctgcgcacgctggctgggaaacaacacgtcaatactcacaccattcagcagccacggacgcccatgttccagataggtttccagccagtaaaccgcctcttcacctaacggcaccagacgctctttgttgcctttaccaatgacccgtaccacgccctgacgcaggctgatatcactcattgtcagtccgaccagttcagagacacgcagcccggtagcatacaacacttcaagcatggctttatcgcgtagctccagtggctgatcgattaatggtgcctgtaataaacgttcgacctgcgcttcgcttaaatcttttggcaaacgctggggcaatttcggactagcgagatgcgcactgggatcgtcttcacgaaacttttcgcgataaagatactggaacaatcggcgcactgcactcagcaaacgcgcactgctggtggctttatacccgccctccagccgttctgccagtaatgcctgcaaatcgtcactttgcgccgtcgccagcgtcaacccgcggtgatgcaaccactccaccatcatactcagatcgcgacggtaagcgttcaacgtattttcagccagatttttttccagccacagagcatcaagaaactgctcgatgcgtgccagatcctgtttcacttgcgccccttatggtcactcatttgatccattatgccttattgtgccgtgactaaagcgattctgatacactagccgcaaaagccacagcagaatcgagaagcttacgttatgaatatgggtcttttttacggttccagcacctgttacaccgaaatggcggcagaaaaaatccgcgatattatcggcccagaactggtgaccttacataacctcaaggacgactccccgaaattaatggagcagtacgatgtgctcattctgggtatcccgacctgggattttggtgaaatccaggaagactgggaagccgtctgggatcagctcgacgacctgaaccttgaaggtaaaattgttgcgctgtatgggcttggcgatcaactgggatacggcgagtggttcctcgatgcgctcggtatgctgcatgacaaactcagcaccaaaggcgtgaagttcgtcggctactggccaacggaaggatatgaatttaccagcccgaaaccggtgattgctgacgggcaactgttcgtgggtctggcgctggatgaaactaaccagtatgaccttagcgacgagcgtattcagagctggtgcgagcaaatcctcaacgaaatggcagagcattacgcctgatctcactgacggcttagcgcatatgctttgccgtcatctttatctttgcgtctcttgttgcaacaaaatccgccgtaaatcccgccattcagcttcgtccatgctgtcggctgccagccataaatgttgccgtttaccgccatcagaacgtaaacgcagcatcatgccgctcttaatcatccacggtgctttgacgatgctccactcctgcccttgccaacgcaaacgcccgtccatcaacaagcgaatttccccctggcgagcattaatacgccgctggctgcgaacgcaatcaaacaccaccaggctaagtaacaccatccataacggggtgtaactgagtggccagggcatgagtaaaataacagcggcaaccagcccatgaatcagcaaggaaagccactgtgcgcgccaggagacgcgcaaatcagattgccacaggaccacgttcccggttccgtgtctggatgagtcggaccatcatttccagttctgcatcggccggtttaccgtgattcatcagccagttaaacaggtccggatcgtcacattccagcagacgaataaagatgcgtttttcgtcatcgcttaagctgtcgtactcatgttcgaaaaacggcatgatactaatatcgagttcgcgcataccacggcggcatgcccaatgaatgcgggctttgttgttaatgtccatcttcttcctgtctcacgaaaatccagtacccggctattgtaacgtgtttttcgccttcttttacgggaatatcagtaaacaccatcgcgatcgcgaaattaattcacaacaattcaatggcttcatttttttggaagtcgcctcgcagaaggcacagatcgcgtagtgaaagcacttgcattgcctcatagctcttttaccattagtcattaatacgccgttaagcaactcaggactctattatggcttttacaccttttcctccccgtcagcctacggcttctgcccgtttaccgctgacgctgatgacgcttgatgactgggcgcttgccaccattactggcgcggacagcgaaaaatatatgcagggtcaggtgacagcagatgtcagccagatggcagaagatcagcacctgctcgccgcccattgcgacgccaaaggtaaaatgtggagcaatttacgtctgttccgcgacggcgatggctttgcatggattgaacggcgcagcgtgcgtgaaccgcagctgactgaactgaaaaaatatgcggtattctctaaagtgaccatcgcgccagacgacgagcgtgtgctgcttggtgttgccggttttcaggcgcgcgccgcgctggcaaatctctttagcgaactgcctagcaaagaaaaacaggtagtcaaagaaggcgcgaccactttgctatggtttgaacacccggcagaacgtttcctgatcgtaaccgatgaagctactgctaatatgctgaccgataaactgcgcggtgaagcggaactgaacaatagccaacagtggctggcattaaacattgaagcgggtttcccggtgattgatgccgccaacagcgggcagtttatcccacaggcgaccaatctccaggcgctgggcggtatcagctttaagaaaggctgttataccggacaagagatggtggcgcgagcaaaattccgtggtgccaataaacgtgcgctctggttgctggcaggtagcgccagccgactgccggaagctggtgaagacttagagctgaaaatgggcgagaactggcgtcgtaccggtacggtactggctgcggtaaaactggaagatggtcaggtcgtggtacaggtcgtcatgaataacgatatggaaccggatagcatcttccgcgtacgcgacgatgcgaatacattgcatatcgagccgctgccgtatagcctcgaagagtaaatctctttatcgcatcaggcatttatcgcctgatgcgacgctggcgcgtcttatcatgtctgggatttgatgcctttatcacaacagggacgaggcccgtagatcggataaggcgttcacgccgaatccggcagttgtgctccgatgcctgatgcgacgctggcgcgtcttatcaggcctacaaaggcatacccattacgcctgcccaatatacaaatagatcgccagaaagtggcacacactaccgccgagcacgaagccgtgccagatggcatggttgtatggaatgcgtttgcagacgtagaaaatcaccccgaggctataaaccacgccgcctaccgccagtaaggtaacgctgcccgccgcgagcttaactgccatttcataaattaccaccaggctcagccagcccatcgccagataggtcaccagagataaaattttgaatcggtgcgcgatggtcagtttaaacagaatacccagcaatgccaggctccagataacaatcatcaacccgcgcgctaacggagaatccagccccaccagcaaaaacggcgtgtaggttccggcaatcaacaggtaaatagcgcaatggtcaaatttcttcagccacatttttgcccgttgatgaggaatggcgtgatagagcgtgctagcgaggaacagcaggatcatactgccgccatagaggctgtagctggttatcgctgtggcgctggcattaagatccaccgcctgaaccagtagcaacaccagcccaacgataccaaacaccaacccaatgccgtgactgacgctgttggctatttcctctgccagactatatccctgcttaatgaggggcttctgaaccataacttactccggagaaacgtacacgcacatgtatacctctccagcgtaactgagaatagttccagtgaacacctgttagctaaaataaattctgatttgagactaatctcctaaaaatcatgaaattaaatgcgaaatttcaactaacaggcgtgagttcaatttaaagacatttaaattcaatcacataaaattgtgtctgaccgggatagatgtcagcaatgacttttttcagttcagtcagggtcatattttcctgctctgcatgtttttcagtcagcgtatccagcgttacggtactggttgcggtgacttcaatcgtgcaaaaataaccgtcatcttcaaaacgtccgacacgaagcacatcacccgttttgaagtggctttcagactcgtcgcggatggtgatggttttacgcccagccagaatgtcatcctggaaacgttgaaaaaaagtgatgtcgtttggctgcatggtactatttcctgtaagaattgactcatctggagcctatgatagtgaaaaaactcaccttaccgaaagatttcttatggggcggcgcagttgccgctcatcaggtcgaaggcggctggaacaaaggcggaaaagggccgagcatttgtgacgttctgaccggtggcgcacacggcgtgccgcgcgaaatcaccaaagaagtcttgccaggaaaatactatccaaaccatgaagccgttgatttttatggtcactataaggaagacatcaagctatttgccgaaatgggcttcaaatgttttcgtacatccattgcctggacgcgcatttttccaaaaggcgatgaagctcagccaaacgaagaagggctgaagttctacgatgatatgttcgatgaactgctgaaatacaacatcgaaccggtgatcaccctctcccactttgaaatgccgctgcatctggtgcagcaatacggtagctggaccaaccgtaaagtggttgatttctttgtacgtttcgcggaagtggtatttgaacgctataagcacaaagtcaaatactggatgaccttcaacgaaattaacaaccagcgtaactggcgtgcaccgctgttcggttactgctgctccggcgtggtgtataccgagcatgaaaacccggaagagacgatgtatcaggtgctgcatcaccagtttgtcgccagcgccctggcggtgaaagctgcgcgtcgcattaacccggagatgaaagtcggctgtatgctggcgatggtgccgctctatccttactcctgtaacccggacgatgtgatgttcgctcaggagagcatgcgcgaacgctacgtctttaccgatgtgcagctacgcggctattacccgtcctatgtgttgaacgagtgggagcgtcgcggatttaacatcaaaatggaagacggcgatctggatgtgctgcgtgaaggcacctgcgattatcttggtttcagctattacatgaccaatgcagtgaaggccgaaggcggcaccggcgatgcgatctctggttttgaaggcagcgtaccaaacccgtatgttaaagcatctgactggggctggcagattgatccagtaggtctgcgctatgcactttgcgaactgtatgagcgttatcagaggccgctgtttattgtcgaaaacggttttggcgcttacgacaaagtggaagaagatggcagcatcaacgacgactaccgcattgactacctgcgcgcccatatcgaagagatgaaaaaagcggtgacttacgatggcgtggatctgatgggctacacaccgtggggctgcatcgactgcgtgagcttcaccaccgggcagtacagcaaacgctacggctttatctatgtgaataaacatgacgacggtactggcgatatgagccgtagtcgtaagaagagctttaactggtacaaagaggtgattgccagcaacggcgagaagctttaagtcgatgaagtaccggatgcaatacttgttgcatccggtcagacaacttccctgttttatttcccgcccgccaaatcgataaaacttcccgtgacgtaagaggctttatcacttagtagccagacaatggcctgcgcgacctcttctgcctgtccaccacgctgcatggggatgttgctcttaacgcgatcgacgcgtccaggctcgccgccgctggcgtgcatttcggtataaataaaccctggccgcacgcagttaacgcggatcccctgcgcggcgacttccaggcttagtccggtggttaacgtatcaatcgcccctttgcttgccgcgtaatcaacatattcccctgggctacccaaccgactggccacgctagagacattgacgatagcgccgccactgccaccatttttaagcgccatgcgttttaccgcctcgcggcagcagagaaaatatcccgtcacgttggtggaaagtactcggttgattcgctctgcggtaaggttttcaacggtgcactgggtaaacaagatcccggcgttattgaccagcgctgctagcggttcatcgtgctgatcgattgctgtaaacatcgcaacgacctggttttcgtcgctgatatccgcctggagcacgaatgctttgccaccggcttgcgttattaagttcatcacttcctgcgccgcgtggaggttttgctgataattaaccgccaccgtatacccttcttgcgccaacagtaatgcagttgcccgcccgatgccgcgactgccaccagtcacaagtgctatagccatttgtttttccgagaaaaattaattcgttgacgtatctttgagattgctaacaaactggctcaatcttcaatgttggcacgcttttccccctcgccctttcagggagagggccggggtgagggtaaatattcgcgccagtgccggcctgttcccctcaccctaaccctctccccaaaggggcgaggggactgtctgagcacttttgtactttgtcatctgactaaaaaggcgccgaagcgcctttagaaaatagtcgaatcagtgaattactggtattcgctaatcggtacgcaggagcagaacaggttacggtcgccgtaaacatcatccagacgtttcactgtcggccagtatttgtctgccacacctgccgggaataccgcaacttcacggctgtacggatgcgcccactcggcgaccagttcgctctgaatgtgcggcgcgttcaccagcgggttatcttccagcggccagacaccggctttcacctggtcaatttctgcgcggatagccagcatcgcgtcgataaagcgatccagttccactttgctttcagattcagtcggttcaaccatcagcgtacccgccaccgggaagctcatcgtcggcgcgtggaaaccgtagtcgatcaggcgcttggcaatatccagctcgctgatgccggtttcttctttcagcgggcgaatatcgagaatacattcgtgcgccacgcgaccgtcgcgaccggtatacagcaccgggaaggcatcctgcaggcggctggcaatatagttggcgttgaggattgccacctggcttgcttttttcagcccttctgcgcccatcatgcggatgtacatccagctgattggcaggatagaggcgctaccgaacggtgccgcagaaaccgcgccctgacgggttaacatgccttcgatttgcaccacgctatgacccggtacaaacggtgccaaatgcgctttcacgccgatcggtcccatacccggaccaccaccgccgtgcggaatgcagaaagttttatgtaggttaaggtgactaacgtccgcaccaataaagcccgggctggtgatgccaacctgggcgttcatgttcgcgccatcaaggtaaacctgaccgccgaactgatgcacgacttcacacacttcacggatcgtttcttcatacacgccgtgggtagaaggataagtcaccatgatacaggagaggttatcgcccgcctgttccgctttcgcgcgcagatcagtcagatcgatgttgccgtttttatcacacgccacaaccaccacctgcattcctgccatatgtgcagaagcggggttagttccgtgcgcagaagccgggatcaggcagatatcgcgatgcccttcgttgcggctttcatgataatgacgaatcgccagcaggcccgcgtattcgccctgtgcgccagagttcggctgcatacaaacggcgtcgtaaccggtcagtttcaccagccagtcagccagctgcgcaatcatctgctgataaccttcggcctgctccggcgggcagaacgggtgcagttcggcaaattccggccaggtgattgggatcatctcggcggcggcgttcagtttcatggtgcaggaacccagcgggatcatcgcctgattcagcgccagatctttacgctccaggctgtgcatatagcgcatcatttcggtttcgctgtggtagcgattaaacaccggatgggtgaggatttcgtcgtcgcgcagcatcgcaggctggatagagcggctgtcgtgagccacgtctttgtccagcgtgtcgatgtccaggccgtggttatcgcccagcagcacgttgaaaagctgcattacgttttcacgcgtggttgtttcatcaagggtgatcccaaccgcgttcagaatatcgctacgcaggttgatttcagccgcttcggcacgcgtcagtacgcccgctttgtcggccacttccacacacaaggtgtcgaaatagtgcgcatggcgcagtttcagacctttttgttgcaggcccgccgccaggatatcggtcagacggtgaatgcggttagcgatacgtttcaggccaaccgggccgtgataaacggcatacaggctggcgatgtttgccagcagtacctgggaagtacaaatgttggagttcgctttctcacggcggatatgttgctcgcgagtctgcatcgccatgcgcagcgcggtattgccagctgcatctttgcttacaccgataatacggcccggcatactgcgtttgtattcatctttcgccgcaaagaatgccgcgtgtgggccaccgtagcccatcggcacgccgaagcgttgcgcgctaccaaaaacaatatccgcgccctgtttacccggcgcagttaacagcaccagcgccataatatcggcggcaacgctgaccacaattttgcgacttttcagttcgctaataagcgcagtgtagtcgtgaatttcaccggtagtgcctacctgctgtaacagcacgccgaagacgtcctgatggtcgagcactttttgcgcgtcatcgacaatcacttcaaaaccaaaggtttcggcacgagtacggaccacatccagcgtttgcggatgcacatcggaagccacgaagaagcggttggcatttttcagtttgctgacgcgtttcgccatcgccattgcttcggcggcagcggtggcctcgtccagaagagaagcagaggccatatccagtccagtcaaatccagcgttacctgctggaagttgagcagtgcttcaaggcggccctgggagacttcaggttgatacggagtgtacgcggtataccagcccggattttccagcatgttacgcaggataaccggcggtagctgcacggcggtgtaacccatgccgatgtaagacgtgaagcgtttattgcgactggcaatagccttgagttctgccagtgcggcgtattcggtcgccggtgcgccaacctgcggtggtgtcgcaagttgaatatctttcggcacaatctggccggtcagcgcgtttaagctttgtgcaccaacggcattcagcatttcttgctgttgcgcggcgtccggtccgatatggcgttcaataaaagcgccgctgttttcaagctggcttaacgtctgtgtcatgagcgatggttcctgaaacgtgcagtgaattgtgaacctctctccttacgaagagagtgagggtgaggcataaattttcctcaccctgatcctctcccgcagaagaggaataaagccgttactcgtcttctaacaatgcttcgtatgcggtcgcatccagcagactttccagttcgctttcatcgctggctttgattttaaagatccagccgcctgcatacggttcgctgttcaccagttccggggaatcgctcagtgcgtcgtttaccgccacgatttcaccgcttactggcgcataaatgtcactcgccgcttttacgctttcggcaaccgcgcagtcatcgcccgcgctaaccgttgcgcccacttccggcaggtcaacaaacaccatatcgcctaacagctcctgagcatgttcggtaataccaacggtgtaagtgccgtcggcttctttacgcagccattcgtgttctttgctgtatttcagttctgctggtacgttgctcatcaatcaatctccaaaaaagtaaatcacgcgacggctttgccgttacgcacaaaaacaggttttgtcactttaaccggcatttcacggttgcgaatttgcacaatcgccgtttcgccaataccttccggcacgcgcgccagcgcaatgctgtaacccagcgtcggggagaaagtaccgctggtgataatgccttcatgctggttgccctgcgcatcggtaaagcgtaccggcagttcattacgcagcacgcctttttcggtcatcaccagaccaaccagtttttctgtaccatgctcacgctgcacttccagggcttcacgaccgataaagtcacgatctgccggttcccaggcgatggtccagcccatgttggcggctaaaggagagatggtttcgtccatctcctgaccataaagattcatgcccgcttccagacgcagcgtgtcacgcgcgcccaagccacatggcttaacacccgcttccaccagcgcacgccagaaatcggccgctttttcattgggcagcgcaatttcatagcccgcttcaccggtataaccagtggtggcaataaacagatcgcccgcctgcacgccaaagaacggtttcatcccttccaccgcctgacgctgggcgtcattaaacagtgtggcagcttttgcctgcgcattcggcccttgcacggcaatcatggaaaggtcatcacgaacggtaatttcgatgccgaaaggttcagcgtgttgggtaatccaggagaggtctttttcgcgggtggcggagttaacaacgaggcggaagaaatcttcagtaaagtagtagacgatgaggtcatctatcacaccgccagaggcattcaacatcccgctgtaaagggctttgccgcttttggtgagcttcgccacatcgttcgccagcagataacgcagaaactcccgggtgcggctgccgcgaagatcgacgatggtcatatgactcacatcaaacattccggcatcggtacgtaccgcatgatgttcgtcgatttggctaccgtaatgcagcggcatcatccagccgtggaaatccaccatgcgagcgccgcaaagcgtgtgttgttcgtacaaaggagtctgttgtgccatcttgtcctcattgaataagcggggctgacaactttttcatggtgaaattatcaccacgaaacccagcatcggagccactcccggtccccaacgcaatcgttctcttttgcctgaacttaccaccgaaacagactgttaaccataaggtaaaattgatcatcacattagcttatggttaaaaaatgcaaaaatcgcgacagaataaaaaaccaaaaaatacaccagtttctatacaaagatgatgtgatgagaaagtcaatttgaataagacaatattaagagctaaaaaaatgtcaaaaaacactaaatcaaaaaataatggcattagaaaatataatgcgaaaacggaggtgaaattagtttatttcaaatgaggaaaatctcccggcgaaaaaaccgggagatgaaagtgtgatgggtatcaaataaacaacagaggagaaatttttaacgcagccattcaggcaaatcgtttaatcccattgcctggcggataagttgcggcttaacgccaggaagcgtgtcggccagtttcaaaccaatatcacgcagcagttttttcgccggattggtaccggaaaacagatcgcggaatccctgcataccagccagcatcaacgccgcactgtgcttgcggctacgctcatagcgacgcagataaatgtactgcccgatgtctttcccctgacgatgcaaccgtttcagttcggcaatcagctctgcagcatccataaagccgagatttaccccctgccccgccagcgggtgaatggtatgtgcggcgtcgcccaccagcgccagacggtggctggcaaactggcgcgcataacgccccgtcagtgggaacacctgacgcgcgctctcaaccttgcataagcccaggcgattatcaaaagcgatatttaacgcgcgattaaattcgtcttcacttgcctgctgcatccgctgcgcttcctctgggctcagactccagacaatgctgcaaagatgcggatcgctaagcggtaaaaaggccagaatgccttcgccatggaaaacctgccgcgccaccgcatcatgcggttcttccgtgcgaatggtcgctaccagcgcgtgatgctgataatcccagaaagtcagcggaatatcggctttgttgcgcaaccaggaattagcgccgtccgcgccaatcaccagacgcgccgttaacatgctgccatctttcagcgtcaggaaggtttcattttctccccaggcgacctgctgtaattctgcgggggctaacagagtgatatcactgctctgatgcgctttgttccacagcgcgtagtgaatcacactattttcaacgatatgcccaagatggctatagcccatgctttgatcgtcaaagctaatgtgaccaaagctgtctttgtcccacacttccataccgtgataacagctggccctacgagagagaatgtcctgccagacgccaagacgggtgagtaatttttcgctggcggcattgatagcgctaacgcgcagttgtggtggtgcattcgccgccagaggttcctgtacgcgctgctccagtacggcaacgcgtaagccgctcccctgtaagccacaggcaaccgccagccccaccatgccgccgccaacaatggctacatcaacactttgcattgtttattccttaaaaccgccttcaacgcgccacccaaccgagggtgcgctgcgccagcacatcgcgtgccggggtgaataattccatcgtcatcagcccgatgttgcgcccgacaaccagcggtgcccaacggttggcaaaaagatgtacaaggctgtccgtgacgccaatggttgcttcgcgatcgctctgtcgacgctgctgataacggcacaatacgccgtaatcccccatgtcttctccgcgctcctgcgcctgagtcagggtttccgcaagactcatcacatctcgcataccgaggttaaacccttgcccggcaatcgggtgcagagtttgcgccgcattgcccaccagcacggtacgatgggtaatagatctggcggcgtgggttaacgccagcggataagcactgcgtttaccagcgtgggtaattttcccaagtcgccagccaaaggcgctctggagttcacggcaaaacttctcgtcactccagctcaacacctcttcgcgccgttccagtggatgacaccagaccaggctacagcgtccgtcagacatcggcaacatcgccagcgggccatgttgcgtaaagcgttcaaaagcgcgcccttcatgcgcaacggaagtagcaacgttggcaatcacggccagttgttcgtaaggctcctgctgccagtcaacgccgcacgcggtggctaacgcactatgggtgccatcagctgctaccagcacgcggcccgtcagcgtctcgccactctccagcgtcacttcaacgtgactctgagtacgggcaacgttagccacgcgatcagggcaatgcagcgttacgccaggtgctttacgcagcaatgcaaacagccgttgcccgacattgtgcaattcgacaacctgtcccagcgccgccagttggtaatcttctgcggcgagggtgacaaatccagcgtgaccacgatcgctgacatgcacggtggtgatggcagttgcgcaatccgccagagattgccagacgccgatgcgcgccagttgctgacaggtacccgccgccagcgctatcgctcgtccatcaaagcccggatgagcatgactctctggcgcagtcgcttcaatcaaatgtaccggcagcgccccgtgacttaaccgggaaatagccagcgccagcgtcgcgcccgccatgccgccaccgacgatgattacgctcattgctttctcgcagcaaccatcaacgcttcgatttcttccggctttttcaccacgctggcggtgaggttttcgttaccggtttcggtaatcacaatgtcgtcttcaatacgaatgccgataccgcgatattgttctggcacttctgcatccggcgcaatatacagccctggttctacggtcagtaccatgcccggttccagaatgcggctgcgatcctgaccataaacacccacgtcatggacatccagtcctaaccagtggctaaggccatgcataaagaaaggacgatgggcgttctgagcgatcagttcatcaacatcacctttcaggatgccgagttttaccaggccgctaaccatgatgcgcaccacttcaccagtgacttccagaatggaagttcccggacgatacaggcgcaggctggtttcgagagactccagcacaatgtcgtagatttcacgctgggcctgggtgaatttgccgttgaccgggaaggtgcgggtaatatcgccagcgtaacctttgtattcacaacccgcgtcaatcaacaccaggtcgccgtcgcgcatttcacactcgttttcggtgtagtgcagaatgcagccgttttcaccgctgccgacaatggtgttataggacggatagcgcgcaccgtggcggttaaattcgtggtgaatttcgccttccagatggtactcgaacattcccggacggcatttttccatcgcccgtgtatgtgccatggcggtgatttctcccgcgcggcggagtacggcaatctcttctgggcttttgaacaggcgcatttcatgaacaacaggacgccagtcgatcatcgttgccggtgcggtgagattttgccggctacctttacgcagtttttccagcgcactgttcacgattacatcagcatatgcatattcgccctgggcatggtaaaccacatccaggccgttaagtagttgataaagttgctgattgatttcgctgaatgccagtgcgcggtcaacgcccagtttctctggcgcggcatcctggcctaagcgacggccaaaccagatctccgccgtcaggtcgcgaacgcggttaaacagaacgctgtggttatgagtgtcatcgcttttaatcagcaccagcaccgcttccggttcgttaaagccggtgaagtaccagaagtcactgttctgacgataggggtattcgctgtcggcgctacgtgttacttctggtgcagcaaaaatcagcgcggcgctgccgggttgcatttgctccaccagggcctgacggcgacgctgaaactcttgccgggatatctcactcataacactctccttacgttttttgtttttagtgtagagtcggtttttgtacttctggcgcggtcggttgcggatgagtaaaggtgtcgtggcataacagcgcggcaacacgaacgtattcgatgatctcttcaaggctcatttcaagctcttcctgatcttcgtcttcgtcgtaacccagttgcgcaatgttacgcagatcgtcgatagcttcaccggtttcgccggtcactttatccagcttcggttgcgtaacgccaagaccaagcaggaagtgattgacccaacctgccaatgcatcagcccgatcgaaaacgctgacatcatcgccatcaggcagataaagctgaaaaaggaagccgtcatcctgcagggcatcgctggtggcagagtgcattttacgcagtgcctgtgccagctcatgaccgaaagccatgccttcgttcgtcaggtcgtgaagtagcggtagccaactgctgtcatcgttaccgccacatatcatcccgctgattaaaccatgcatctcagctggggtcagacccgtcccttgttggttcagatactggttcatttcgttgtaaccaggcatttcgttctgtatagacataagcattcgtcgtcaaagggaggaatattcatgatatgctaccactttgggccctggtggaccagaaaagggcttgtctcttctcatcagggtagctatagtgtcgccccttcgcagaccatgggtctaaagacgaaggcagcgcagtcaatcagcaggaaggtggcatgtctgcacaacccgtcgatatccaaatttttggccgtagtctgcgtgtgaactgcccgcctgaccaaagggatgcgttgaatcaggcagcggacgatctgaaccaacggttgcaagatctgaaagaacgcactagagtcacaaatactgaacagttggtcttcattgccgcattgaatatcagctatgagttagcgcaagaaaaagcaaagactcgtgactacgcggcaagtatggaacagcgtattcggatgctgcagcagaccatagaacaagcgttacttgaacaaggtcgcatcaccgaaaaaactaaccaaaactttgaatgacacttttcggtttactgtggtagagtaaccgtgaagacaaaatttctctgagatgttcgcaagcgggccagtcccctgagccgatatttcataccacaagaatgtggcgctccgcggttggtgagcatgctcggtccgtccgagaagccttaaaactgcgacgacacattcaccttgaaccaagggttcaagggttacagcctgcggcggcatctcggagattcccttcttatctggcaccagccatgacgcaactaccagaactcccactgacattatcccgacaagaaatccgcaaaatgattcggcaacgtcgtcgtgcgttaacgccggaacaacagcaggaaatgggtcaacaagccgctacccggatgatgacttatcccccggtggtgatggcacatacggtcgctgtattcctctcttttgatggcgaactcgacacccagccactcatagaacaactctggcgcgccggtaagcgcgtatatcttccagttttgcatccctttagtgccggtaatttgctgttcctgaattaccatccgcaaagcgaactggtgatgaacaggttgaagatccatgagccaaaattggatgtgcgtgacgtgctacccctttcccgattagacgtgctgatcacaccgctggtcgcctttgatgagtacggtcagcgcctgggaatgggcggtggtttttatgatcggaccttacaaaactggcagcactataaaacgcaaccggtgggttatgcgcatgattgtcagttggtggaaaaactccccgttgaagagtgggatatccctcttcctgcggtggttacaccgagcaaagtctgggagtggtaagggcgatacacccgcatcgccctgattgacatcgttgattctttgacctaatttagtgagtaagggtaagggaggattgctcctcccctgagactgactgttaataagcgctgaaacttatgagtaacagtacaatcagtatgatgacaagtcgcatcataacccttctccttcaagccctcgcttcggtgagggctttaccgttacagccccatgctgccctgccatcgtaaatccccattaaataaacacaacgcattgatctgactttgatttattttctggagcagactcgcaaagtagaatgcgcaacgcggcaacggtgtggagaagggataaaaaaacgggcaagtcagtgacctgcccgttgattttcagagaaggggaattagtacagcagacgggcgcgaatggtacccggaatagctttcattgcctgcagcgctttttcggcaacgtcttcgtcggcttcaatatcaataaccacataacccatctgggcggaagtttgcagatattgcgcggcgatgttgacgccctgctcggcgaagattttgttcagcgcagttagcacgcccggacggttttcgtggatgtgcatcagacgacgcccaccgtgcagtggcaggctgacttccgggaagttcaccgcagagagcgtactgccattgtcagaatacttgatcaatttacccgcaacttccaggccgatattctcctgcgcttcctgagtgctaccgccaatgtgtggcgtcagaaggacgttgtcgaattcacacagcggagaggtaaatggatcgctattggtcgccggttccgtcgggaatacgtcgattgccgcccccgccagatgtttgctcgccagcgcatcacacagcgccggaatatccaccacagtaccgcggctagcattaatcagcaggctgccgggcttcattagactaatttctttcgcgcccatcatatttttggtggacggattctctggtacatgcagactcaccacatcgctcatattcagcaggtcagaaagatgctgtacctgagtggcgttgcccagcggcagtttattttcaatatcataaaagtaaacatacattcccaggctttcagccagaatgcccaattgcgtaccaatatgaccgtagccgatgatacccagctttttgccgcgcgcttcaaaagaacccgccgccagtttgttccacacgccacggtgcgctttagcattggcttccggcacgccgcgcaatagcagcagcagttcgccaatcaccagctccgcaacagagcgcgtattactgaacggtgcgttaaataccgggatcccgcgctttgccgccgcatccagatcaacctggtttgttccgatacagaaacagccaatagcgaccagtttttctgcggcgttgatcacgtcttcagtcagatgggtacgggatcgcaggccgatgaagtgggcatcgcggatggattcttttaattgttcatcatccagcgcgcctttgtgaaattcgatgttggtgtaaccagctgcacgaaggctttccagcgccttttggtgcacgccttctaccagcagaaacttaatcttgtctttctccaggcttacctttgccatttacccaatcctgtcttttgaaatgttgtgtgcggatttgcatccgcctttcaacatatcaaaaaataatattgcggcaatatgaacgtttgcgtcgcgatgttgaggaaatatcacgcaaaggtaattcttggatgaatatgctggtttagaggatttatttagagcaatcgacaattgcctggtaaaagcgtgacacatgtcaccaaatttaatgaagagaatttttttaacgggggaggttcccccgtcagatcatttcacaatggttttgacaccgtcaggtgtgccaatcagcgcaacgtccgcgccacggttagcaaacaagccaacagtcaccacgccaggaatcgcatttatggcgttttccatcgctatcgggtcaaggatttccatgccgtggacgtcgaggatcacgttgccattatcggtcaccacgccctgacggtattccggacgaccgcccagtttcaccagctgacgcgccactgcactacgtgccatcgggataacttctactggcagcgggaatttacccagaatatcaacctgcttggaagcgtctgcaatacagataaatttttctgcaacgctagcaatgattttttcacgggtcagcgccgcgccgccgcctttgatcatttgcatgtggccgttgatttcatctgcgccatcaacgtagatgccaaggctgtcgacttcgttgagatcaaaaacgtgaatgccgaggcttttcagtttttcagtggaagcatcactactggaaacggccccttcaatctggcctttcattgtaccgagcgcgtcaataaagtgtgcggcggtggaacctgtacctacaccaacaatggtgccgggctgaacatactgaagtgccgcccatcctactgcttttttcaattcatcctgcgtcatgatcgtttcgcctgtggtatgaaatttcacacgcattatatacaaaaaaagcgattcagaccccgttggcaagccgcgtggttaactcatccataaaatatcgcgcaatggcaggcatcccctttcgccccgcaaataaagcatacaacggtctgggtatgccgctccacggtgcaaacaggcgcaccagttcaccgttcgcaagcccctgtttacaggcaaattgaggcaataacgccacgccattcaacacaaccagggcgcgaactcgctgagcgaaatgcattagcgcaaatccctgatcttttaagctgcgcttttaaccacggatacaaatgttacccgccgacggcttcggtatatgcaacctgacacaaaattgtgtcatagtgcaggaaaaagcatttaccaggagcagacaacagcaatgaaacgcccggactacagaacattacaggcactggatgcggtgatacgtgaacgaggatttgagcgcgcggcacaaaagctgtgcattacacaaagtgccgtcagtcagcgcattaagcaactggaaaatatgttcgggcagccgctgttggtgcgtaccgtaccgccgcgcccgacggaacaagggcaaaaactgctggcactgctgcgccaggtggagttgctggaagaagagtggctgggcgatgaacaaaccggtagcactccgctgctgcttagtctggcggtcaacgccgacagtctggcgacgtggttgcttcctgcactggctcctgtgttggctgatagccctatccgcctcaacttgcaggtagaagatgaaacccgcactcaggaacgtctgcgccgcggcgaagtggtcggcgcggtgagtattcaacatcaggcgctgccgagttgtcttgtcgataagcttggtgcgctcgactatctgttcgtcagcagtaaaccctttgccgaaaaatatttccctaacggcgtaacgcgtagcgcattactgaaagcgccagtggtcgcgtttgaccatcttgacgatatgcaccaggcctttttgcagcaaaacttcgatctgcctccaggcagcgtgccctgccatatcgttaattctagtgaagcgttcgtacaacttgctcgccagggcaccacctgctgtatgatcccgcacctgcaaatcgagaaagagctggccagcggtgaactgattgacttaacgcctgggctatttcaacgacggatgctctactggcaccgctttgctcctgaaagccgcatgatgcgtaaagtcactgatgcgttactcgattatggtcacaaagtccttcgtcaggattaatccatcaaataatgcctgatagcacatatcaggcgttgtcctcacttctttttgtattccttgaatcacatcacaaaatagacaaatctcaggcggcaaaaaacgacgtctgaatgcattttttttgctggcgacaaacccacgtaaaaagctcaccgtaggcgcaaataccctcattttgattgcgttttacggagcaaataatgtctaacgtgcaggagtggcaacagcttgccaacaaggaattgagccgtcgggagaaaactgtcgacagcctggttcatcaaaccgcggaagggatcgccatcaagccgctgtataccgaagccgatctcgataatctggaggtgacaggtacccttcctggtttgccgccctacgttcgtggcccgcgtgccactatgtataccgcccaaccgtggaccatccgtcagtatgctggttttagtacagcaaaagagtccaacgctttttatcgccgtaacctggccgccgggcaaaaaggtctttccgttgcgtttgaccttgccacccaccgtggctacgactccgataacccgcgcgtggcgggcgacgtcggcaaagcgggcgtcgctatcgacaccgtggaagatatgaaagtcctgttcgaccagatcccgctggataaaatgagcgttagcatgaccatgaatggcgcagtgctaccagtactggcgttttatatcgtcgccgcagaagagcaaggtgttacacctgataaactgaccggcaccattcaaaacgatattctcaaagagtacctctgccgcaacacctatatttacccaccaaaaccgagtatgcgcattatcgccgacatcatcgcctggtgttccggcaacatgccgcgatttaataccatcagtatcagcggttaccacatgggtgaagcgggtgccaactgcgtgcagcaggtagcatttacgctcgctgatgggattgagtacatcaaagcagcaatctctgccggactgaaaattgatgacttcgctcctcgcctgagcttcttcttcggcatcggcatggatctgtttatgaacgtcgccatgttgcgtgcggcacgttatttatggagcgaagcggtcagtggatttggcgcacaggacccgaaaagtctggcgctgcgtacccactgccagaccagtggctggagcctgactgaacaggatccgtataacaacgttatccgcaccaccattgaagcgctggctgcgacgctgggcggtactcagagtctgcataccaacgcctttgacgaagcgcttggtttgcctaccgatttcagtgcacgcattgcccgcaacacccagatcatcatccaggaagaaagtgaactctgccgcaccgtcgatccactggccggatcctattacattgagagcctgaccgatcaaatcgtcaaacaagccagagctattatccaacagatcgacgaagccggtggcatggcgaaagcgatcgaagcaggtctgccaaaacgaatgatcgaagaggccagtgcgcgcgaacagagcctgatcgaccagggcaagcgtgtcatcgttggtgtcaacaagtacaaactggatcacgaagacgaaaccgatgtacttgagatcgacaacgtgatggtgcgtaacgagcaaattgctagcctggaacgcattcgcgccacccgtgatgatgccgccgtaaccgccgcgttgaacgccctgactcacgccgcacagcataacgaaaacctgctggctgccgctgttaatgccgctcgcgttcgcgccaccctgggtgaaatttccgatgcgctggaagtcgctttcgaccgttatctggtgccaagccagtgtgttaccggcgtgattgcgcaaagctatcatcagtctgagaaaagcgcctccgagttcgatgccattgttgcgcaaacggagcagttccttgccgacaatggtcgtcgcccgcgcattctgatcgctaagatgggccaggatggacacgatcgcggcgcgaaagtgatcgccagcgcctattccgatctcggtttcgacgtagatttaagcccgatgttctctacacctgaagagatcgcccgcctggccgtagaaaacgacgttcacgtagtgggcgcatccagtctggctgccggtcataaaacgctgatcccggaactggtcgaagcgctgaaaaaatggggacgcgaagatatctgcgtggtcgcgggtggcgtcattccgccgcaggattacgccttcctgcaagagcgcggcgtggcggcgatttatggtccaggtacacctatgctcgacagtgtgcgcgacgtactgaatctgataagccagcatcatgattaatgaagccacgctggcagaaagtattcgccgcttacgtcagggtgagcgtgccacactcgcccaggccatgacgctggtggaaagccgtcacccgcgtcatcaggcactaagtacgcagctgcttgatgccattatgccgtactgcggtaacaccctgcgactgggcgttaccggcacccccggcgcggggaaaagtacctttcttgaggcctttggcatgttgttgattcgagagggattaaaggtcgcggttattgcggtcgatcccagcagcccggtcactggcggtagcattctcggggataaaacccgcatgaatgacctggcgcgtgccgaagcggcgtttattcgcccggtaccatcctccggtcatctgggcggtgccagtcagcgagcgcgggaattaatgctgttatgcgaagcagcgggttatgacgtagtgattgtcgaaacggttggcgtcgggcagagcgaaacagaagtcgcccgcatggtggactgttttatcagcttgcaaattgccggtggcggcgatgatctgcagggcattaaaaaagggctgatggaagtggctgatctgatcgttatcaacaaagacgatggcgataaccataccaatgtcgccattgcccggcatatgtacgagagtgccctgcatattctgcgacgtaaatacgacgaatggcagccacgggttctgacttgtagcgcactggaaaaacgtggaatcgatgagatctggcacgccatcatcgacttcaaaaccgcgctaactgccagtggtcgtttacaacaagtgcggcaacaacaaagcgtggaatggctgcgtaagcagaccgaagaagaagtactgaatcacctgttcgcgaatgaagatttcgatcgctattaccgccagacgcttttagcggtcaaaaacaatacgctcagtccgcgcaccggcctgcggcagctcagtgaatttatccagacgcaatattttgattaaaggaatttttatgtcttatcagtatgttaacgttgtcactatcaacaaagtggcggtcattgagtttaactatggccgaaaacttaatgccttaagtaaagtctttattgatgatcttatgcaggcgttaagcgatctcaaccggccggaaattcgctgtatcattttgcgcgcaccgagtggatccaaagtcttctccgcaggtcacgatattcacgaactgccgtctggcggtcgcgatccgctctcctatgatgatccattgcgtcaaatcacccgcatgatccaaaaattcccgaaaccgatcattagcatggtggaaggtagtgtttggggtggcgcatttgaaatgatcatgagttccgatctgatcatcgccgccagtaccagtaccttcagtatgacgcctgtaaacctcggcgtcccgtataacctggtcggcattcacaacctgacccgcgacgcgggcttccacattgtcaaagagctgatttttaccgctagcccaatcaccgcccagcgcgcgctggctgtcggcatcctcaaccatgttgtggaagtggaagaactggaagatttcaccttacaaatggcgcaccacatctctgagaaagcgccgttagccattgccgttatcaaagaagagctgcgtgtactgggcgaagcacacaccatgaactccgatgaatttgaacgtattcaggggatgcgccgcgcggtgtatgacagcgaagattaccaggaagggatgaacgctttcctcgaaaaacgtaaacctaatttcgttggtcattaatccctgcgaacgaaggagtaaaaatggaaactcagtggacaaggatgaccgccaatgaagcggcagaaattatccagcataacgacatggtggcatttagcggctttaccccggcgggtagcccgaaagccctacccaccgcgattgcccgcagagctaacgaacagcatgaggccaaaaagccgtatcaaattcgccttctgacgggtgcgagtatcagcgccgccgctgacgatgtactttctgacgccgatgctgtttcctggcgtgcgccatatcaaacaagctccggtttacgtaaaaagatcaatcagggcgcggtgagtttcgttgacctgcatttgagcgaagtggcgcaaatggtcaattacggtttcttcggcgacattgatgttgccgtcattgaagcaagcgcactggcaccggatggtcgagtctggttaaccagcgggatcggtaatgcgccgacctggctgctgcgggcgaagaaagtgatcattgaactcaatcactatcacgatccgcgcgttgcagaactggcggatattgtgattcctggcgcgccaccgcggcgcaatagcgtgagcatcttccatgcaatggatcgcgtcggtacccgctatgtgcaaatcgatccgaaaaagattgtcgccgtcgtggaaaccaacttgcccgacgccggtaatatgctggataagcaaaatcccatgtgccagcagattgccgataacgtggtcacgttcttattgcaggaaatggcgcatgggcgtattccgccggaatttctgccgctgcaaagtggcgtgggcaatatcaataatgcggtaatggcgcgtctgggggaaaacccggtaattcctccgtttatgatgtatagcgaagtgctacaggaaagcgtggtgcatttactggaaaccggcaaaatcagcggggccagcgcctccagcctgacaatcagcgccgattccctgcgcaagatttacgacaatatggattactttgccagccgcattgtgttgcgtccgcaggagatttccaataacccggaaatcatccgtcgtctgggcgtcatcgctctgaacgtcggcctggagtttgatatttacgggcatgccaacagtacacacgtagccggggtcgatctgatgaacggcatcggcggcagcggtgattttgaacgcaacgcgtatctgagcatctttatggccccgagcattgctaaagaaggcaagatcagtaccgtcgtgccaatgtgcagccatgttgatcacagcgaacacagcgtcaaagtgatcatcaccgaacaagggatcgccgatctgcgcggtctttccccgcttcaacgcgcccgcactatcattgataattgtgcacatcctatgtatcgggattatctgcatcgctatctggaaaatgcgcctggcggacatattcaccacgatcttagccacgtcttcgacttacaccgtaatttaattgcaaccggcagcatgctgggttaatgactcgtcccgtcacgatcttcagcaatatgctgaagcatcgtggcggtataacgatgatttctgatactataaagatattcctgcatatacatcggcctgtgcggtgcatcaaaatatttcagcgttgccggattcaccagtcgccaggcaaaatgcgggatcaccgtcagaaaatgtccgcgctccacggcgctgattttggccataaaactgtagggacgataaataatggttggattgatcccacaaggtcgcatattcgcatcaatcattgcttcgaagttggcccggttctgaaagcgcatttgtagccagggcagctcctgaagcagctcttgctcttgtcgctcttcataacggcgagaaacgagaaagcctaatcgcagcggtggtagttcactgatagtcaggttttccagttcctgaactcgtgcagatacatgctgtggggagataataaaatctaactggcggtcaaaaagattatcgataacgccattttcgctgaactcaactggctgggcggtcacgccttcatacttatctccgagactaatcaactgatcgaaaataattgtcggataagtattatctatgccaatcacaatttctcgactacgacgcccactgttatggatttcattatcaatcgcagaaagccgttgataaaccgggaacagtttttgatacagttcctgtccggctttattgaggctgatattattatctttgcgggtaaatagcgtatagccaatttgttcttccagcgcggcaatgcttttaccaaatgggctagccgtcatatggattttttctgccgcccgggcaatattattggtttgcgctaataaaatgaaattgcgcatctttttgctaataaaaatgtccatccccctcccccgcatccttgtccgcttaaccgtttcagtcagcctatccttgatgaaaccgcgagcaaagataggtgattacgtcatggttttacagaaaattacagaaaaaggaggcaatatcgggtaaaggcattagcccgacgaatacgtcgggctacaaatattattgtgctgcaggtgttttagcgggttgttgatccacaggttctaactggaagaccacatcgacctgatcatcaaactgaatagcggcctgctcgtaagtttcctgggcggacaccggcgcggcatcggctttcatcatccgcaccattgggctgggctgatagttggaaacatggtagcgcacgctatataccggccccagtttacgatgaaagccgttcgccagttcctgcgcctgatgaatcgcgttatcaatcgctgccttacgcgctttgtctttataggcatccggctgcgccacgcccaggctcacagaacgaatttcgttaagacccgccttcagcgcgccatccagcaaggaattcagtttgtctaactgacggagcgtgacttccaccgttctcacagcgcggtagcctttaaggatacttttaccatcctgataatcataatctggctgggtgcgtaagttcgcactgctgatatcttttttcgcgatctgattgagttcaaggaaggaaatgtattgtgcgacgcgctcatctgcctgtttcttggcagtagcggcatccttcgcggccacgttaacttcaatcgcaagagtggcaatgtctggcaccgcatccacgcttgccgtaccggaggtgacaatatgcggtccatccggcaattcgttagcctgcgctgccatcccgctaatacccattaatgccgccagggcgataactttgaacttcacgttagtctctccgtgttaattgacttgcccaaaattcaggacctctggaggcaagcttagcgcctctgttttatttttccatcagatagcgcttaactgaacaaggcttgtgcatgagcaataccgtctctcgccagctgcaaggcaataaaccacataacacatcccacaaccagattgataatgcgctgtgcttttgccgtgcgcagacgcggtgccagccaggctgcgagaagagccagaccaaagaaccacaggaaagaggcgctaattgtcccgagtgcaaaccagcgttttggttccacatcaagttgcccgccaaggctgcccagtacaacaaaagtatccaggtaaacatgcggattcagccaggtcactgccaacatggtggcgataattttccatctgccttgcttcatgacttcggcgctggctaactcaatattactgctcattgctgttttaaaagcgccaaaaccataccacagcaagaaggctacgccgccccaggtgaccagcgccagcaaccacgggctctgcatcaataacgcgctgccaccaaaaatcccggcgcaaatcaggaccaaatcgctgatagcacaaagtaaggcaatcataatgtggtactgacgacgtatgccctgattcatcacaaaagcattttgtggaccgagcggtaggatcatagccgccccaagtgcaagaccttgaaagtaataagaaaacacgttggatattccgaattaagtatctgatgcagagactatatcgcgggattgttattagcggaaattgataatattaattggcaatcagaaaaactaataagagagaggccagagagtattatctggcctcagcgttgattacgcagctttgtcttctttcacccgcttaaagttcacatccatttgcgggtacgggaagctgataccggcggcatcaaattcacgtttaatacgctccagcacatcccagtacacgttttgcagatcgccgctgttgctccagacgcggaccacgaaattaatgctgcttgcaccaagttcgttcaggcgcacagtcatttcgcgatctttcaaaatgcgatcttcagactggataatattggtcaggatctgcttaacctgatcgatatcggaatcatacgccacgccaataataaattcgttacggcgaactggctcgcgggagaagttaataatatttccggcaataattttaccgttcggaataacgataattttaccgtctgcagtacgcatggtggtggagaaaatctgcacactcagcacagtaccggctacgccgcccaggtcaacatattctccggcacggaacgggcggaacatgacaagtaacacgccagcggccaggttagacagactcccctgcaaagccagaccaacagctaagcctgcggcaccgagtacagcaatgacactcgcggtttgtacacccacgcgtcccagtgcagcgattagcgtaaaggcgataataccgtaacggactaatgcagaaagaaaatcagcaacagtggcatcgattttacgggagatcatcaggcgattcaccgcgttggaaatcatccgcgcgataatcaaaccaacgatgatgatcgcgagtgccgccacgatgtttactgcataacttagcagcagcgcctggttagctaccagccagcttcccgcgccgtttatgctatcgacaacattcaaatcttccattcaatattccttttcaactgactcaaaatggagaaatacactccgccgccttatgacgggcagtctgacaagggtaaacaataaagcataattttgccaaatagatcacagatttctcatctgaatcaccttgcttttggcgaaaaaatccccgcagagcggggctcagacagatatcaatgtgcgctttgtcatgccggatgcggcgtgaacgccttatccggcctacaaaaacctgcaaattcaatatattgcaggatacgtgtaggcctgataagcgtagcgcatcaggcaattttgcttttggcgaaaaaaagacccgcagagcgggccttgagataagcagaaaggaatatcttacagaacgtcgatcgcgttcagttcctggaatgctttctccagacgagcgatcatgctagtctgaccggcacgcagccatacgcgcggatcgtagtatttcttgttcggctgatcttcgcctttcgggttacccagctgaccctgcagataagcttcgttcgctttgtagtagttcagaacgccttcccaggttgcccattgggtatcggtatcgatgttcatttttactacgccgtagcttacggagtctttgatttcctgagcagtagaaccggaaccaccgtggaatacgaagttcaggctgttgtgcggcaggttgtgtttcttggaaacatattcctgagaatcacgcaggatggtcggagtcagaaccacgttacccggcttgtaaacaccgtgtacgttaccgaaggacgctgcgatggtgaaacgcgggctgattttgctcagttcggtgtatgcgtaatcaacgtcttccggctgggtgtacagtgcagaagcgtccatgtggctgttgtccacgccgtcttcttcaccaccggtgcaacccagttcgatttccagagtcatgccgattttggacatgcgctccaggtatttagagcagatttcgatgttctcttgcagagattcttcagacaggtcgatcatgtgagaagagaacagcggcttaccggtagctgcgaagtgtttttcacccgcgtccaacagaccgtcgatccacggcagcagtttcttcgcgcagtggtcagtgtgcaggataaccggaacaccataatgttcagccatctggtgaacgtgatgcgcaccagagatcgcgcccaggatagcagcaccctgcggaacgtcagatttcacgcctttaccagcgataaaggaagcaccaccgttggagaactgaacgataaccggcgctttaactttagcagcggtttccagtacggcgttgatggagtcagtaccgacgcagtttactgctggcagtgcgaagttgttttcttttgctacctggaaaactttctgtacgtcatcaccagtgattacgccaggttttacgaaatcaaaaatcttagacatgtctcttgtcctgtatcgtcgggccttatactcgtcatacttcaagttgcatgtgctgcgtctgcgttcgctcaccccagtcacttacttatgtaagctcctggggattcactctcttgtcgccttcctgcaactcgaattatttagagtatgaaaaattgcgtgctctaaaagcgcgctgaaacaagggcaggtttccctgccctgtgattttttacttcttagcgcgctcttcgagcatcgctactgcaggcagtactttaccttccacgaattcgaggaatgcgccgccgccagtggagatgtaggagattttgtcagcaatgccgaacaggtcgattgctgccagagtgtcgccgccgccagcgatggagaacgcttcgctgtctgcgatagcgttagccacgatttcagtacctttgcggaagttcgggaattcgaacacgccaaccggaccgttccacagaatggttttcgcattcttcaggatttcagccagttcctgagcggaagcatcaccgatatccaggatctgctcgtcagctttcacatcgttaacagatttcagggtagccggtgcagtttcagagaactcggttgctacgcgaacatcagacggaaccgggatgttgcaggtggtcagcagacgtttagcttcgtcaaccaggtcagcttcgtacagggatttacccacatcgtggccttgtgccgcgataaaggtgttagcgataccaccaccaacaatcagctggtcagcgattttagacagggagtccagaacggtcagtttggtagatactttagaaccaccaacgatagccaccatcgggcgagcaggttctttcagtgctttacccagcgcgtccagttcagctgccagcagcgggcctgcgcacgcaacgtcagcgaatttaccgataccgtgagtagaagcctgcgcgcggtgagcagtaccgaatgcgtccattacgaacacgtcacacagtgcagcgtattttttggacagggtttcgtcgtctttcttctcgcctttgttgaagcgaacgttttccagaacaaccagttcaccttcagcaacgtcaacgccgtcgaggtaatctttaaccagacgaaccgggttagacagtttgtctttcaggtagttaacaaccggcagcagagagaattcttcgttgtactcgccttcggtaggacgacccaggtgggaagttaccatcacttttgcgccttgtttcagggccagttcgatggtcggcagagaagcacggatacgcgcgtcgctggttactttcccgtcttttactggtacgttcagatccgcacggataaatacacgtttcccagcaagatccagatcggtcatcttaattacagacatggtgaatcctctcgttgattctaaaagttttgcagacgctgcttgcgtcttacctgaaagcaacagtagccatagctaacgtcgtgtcgagcattcggttagcaaagccccattcgttatcgcaccagaccaacgttttgatcaggtgtgcgccactgacccgggtttgggtgccatcgacaatggcactgtgcggatcgtggttaaaatctacagagaccaacggcaattccgtatagtcaactataccatgaaatgcaccttgtgctgctttttgcagcaacaggttgacttcattggcttttacaggtttcttcaccgtcacgcttaaatcgattgccgtcacatttatggttggcacacgtaccgcaatcgcttcaaagcgatcgttaaattgcggaaaaaatcgtgtgataccggcggccagtttagtatcgaccggaatgatgctctggctggctgcccgggtgcgacgcaggtcaggatggtatgcatcaataacctgttgatcgtgcatggcggagtgaattgtggtcacagtgccggactcaataccgtacgcatcatctaacaatttgatgacgggaattatgcaattcgtggtacaggaagcgttagaaacgatgcggtgttccgcacgaagttgatcctgattgacgccgtaaacaacggtcgcgtcgagatcgttactgccaggatgactaaagagcacttttttggccccggcggcaatatgcgcttcgccatgctcgcgggagccatatacgccggtgcagtcgaggactacatcaacgccaagttcacgccaggggaggctttgcagactacgttcatgcaatacgcggatggcgtcatcaccaacaaaaagttgatcgcgttcctgtcgtacttcccatgcaaaacggccatggctggtgtcatatttcaacaaatgcgccatgcccgcagcatccgccagttcgttgattgccaccacggtaatttccgcccggcgtccggattcatacaaagcacgaaccacattacgcccgatgcgaccgaagccatttatcgctacgcgtacggtcatagatctcctgcaaggttttccctgagcaaatttgccagacagagtaatccagcaaatcgtccggggaaaccttacctgtcgcaaactgcgactgattggttaattgtcgaacatttaatcgactgaaacgcttcagctaggataagcgaaacgtggaataaaaggaatgtttgtccagccgaagaagacatttatctgactcacatcacacttttatccccttttgtgggaagctttattccaggctggcgtaataataaccctacaataactggaataaattgtcagcttgtgaagtgataccggccttcttcagtcatctctactatcagattggcctgacggctattcatcagcacacgctcgacattggggccatcggtgcgggcataaaatgcttcggctacttgccgcgttaatcctcccgcaattttacgactaatcaagcgctcccgcagaatttgagcaggtgcatgaataaaaatagaaaaatcgcagaaagatgccaactccagccacttttcatcatccagtaacaaccagtttccttcgacgatgacgagtggtgcggtaacgtgcaacgcatcttcaacaggatcatgcttttgtcgatcgtactgcggccacgtacaatccccttccacgacctggcgcagattttccgtcagtttcgcaacgtcaaatgtctctggtgcgcctttgaaggggcgcaattgatgcgcatccagccagctattgtaatggtgaaaaccatccatcgggagcgtctgaatagcgggcagttccgggtcttgttgcgcgagatattcccagaaggtggttagggtacttttacccgtccccggcggagcgcaaagaaaaaccaccgtacgccgctgcggatttaccgtctgtaaggccgccaacatgtgcagcaacggtttatgtacattttcaatctcttcgttctggtactgtgcctgtatcttcagcccattcaccgttaattcaattttcacggcgttaattcctttaaggtggtcgttactgccagcgtcagcgccgttttgaccattccgctaaaacgcgcctcactccagacggagaaatcagcgaacttcatcgcttttaacgcgtcatagagcatcgcattgcgggttatgctattgacgttgctgataaaatcccaggtcatgtcatcggcaaatccgggcgtttcatcctgttcgttcaggtaatgccagaactgggaaaaatgcgtgatatcggcgtacaaccatttatccattttcccaacgcataaatcaaacgcagtgcaacatcaatatcgtcaagcgggccgctttgggcgagtaacggcttcactgcatattccacgatctcttcatcgttatcgacaaacaggctcggcagaaactggcgtatcccctggagcaaaatggtatgcgcagttttcataaaactaaataaattgtcctgtgcatccagttgctcaagcacatcatcttctgtcagcgtcgccattggtcttccgatagatcaccatcaatgcagggagtctattatattacacgtttggtccgcgccgccgatcagtaatgtctgcgtccgcaccccattcgccgtctgttggataccgttcaccagctcaccgcccgtcacgcccgtagcgctaaagaggatatcgttccccctcaccagttcatcgaggctgtacacacggttaacgtcaacgcccattgccttgcaacgcttgcgctcctgctctgcaatctgccgattttccgtgtaatcccctttagcctggcaaaagtcaatcagctcggcctgcatatccccgcctaatgctttaacggcacaggcagaaatcacgccttctggcgcaccgccgatggtgtacatcacatcgtaaggattatcctgccagcaggtcagcacgctggcggcgacatcgccatccggcagggcaaaaaccttcacgcccagctgtgttgcttcctcaatcgcggcactcaggcgcggtttatccagcgtaaccatgcgcagcttatccagcggtttgcctaacgctttcgccacgttgcgcaggttgtccgtcagaggcaaagacagatcaatcgcgcccgccgccagccgattaacaaccagctttttcatatacatatcgggcgcatgtaacaggctatctcgaggggcgaaagccatgaccgccagcgcattgctctgccccatcgccaccatccgcgtgccttcaatgggatcaaccgcgatatcgacttctggcccatcgcctttgcccacctcttcgccaatccacagcatcggcgcatggtcaatttctccttcgccgataaccactcgtccacgaaaagcgacgtcgtttaatgcctggcgcatcgcggtgaccgccaggccatcaattttatttttgtcgccacatccggtttgcggccaggcagccaacgctgcctgttccgtaacgcgaaataatggccacgccagggacatcattgcgcggcctccccgatatcaacgccaaattgtgccagcagatatttctcggcctgttcattccagatgccgtgcgtttcctcaaccagccgcgccaactctttaaacagcggatcggttttgcctttttcggcaaaatcggcaatggcagtgagcggcatggtcacgccgttataaatgagttttttaccgccagggatatccggcagattgagcacggtttctggcaccgcatccaggccaccgatatgggtcaccataaagctcggctgtaactgcccagtggcgctaagggcaatcgcctctttcatgtcgtccgtactaccgccagatgtaccgacgacgtgcgtgctgttgtaatggacgttgtagaaattaaacggcactttgaagtttttatccgtcggcccggcaaagaagttcagacagccatcttccgccagtaattcatcagccatctcaacgacagcaggcaccgccgcataaacaaaaatgtcatcgaacccggcatctcctgtcagcgcccgcagcatctggacaggatcgctcatccctttggtattcacatacaccagctcaatgcctttactggccgccagttccaccggcagcagcttctgtacctgcgccagacgtttgtcgtcgatatcgaccaccaccacccggctcggttgtatgccgccgttaatggcgtaatcgatagcgccaatgcccatcggacctgcacacgccagcagtgcaatattgccgccaggtttgacgcccatgcgatgctcataaacatattgcgtggtgtgataattggcatgataagcaccaataatgcagcacataggctctgccaggctcgccgcagcaaaataagagccgtgatacggtaatacgcagcccaaattaatggcgatttcgggaataatcatataagtggcattgccgccaaaatattcgtagctgtagcccgcactatatccgcttggtaaccccatcgccggttgcaatacaaaacgctggccttttttatatttgccagtgagatttttacccacttcgacaataaccccggcacattcatgcccggtaatgaccggatgattttctaaatcgtcgggtacgcgtttatgttcactaccgagtaacgccgctttccaggtgcttaaacagacgctgtcagaaattacactcaccagtaattcattatcggtaatttctggcagttcaaatacgcgcagacggacatcccgcttgccataaatagcagcaactttggttttcatttttacctctgtaatcagtgtttatgttcggcggttaattgattaaataaagtgtcgagttttggatcgccaatatagttattaatcaatatcagtggtttatccgtcacacgtttcacgcgcccttccagactggcatgagtaacgacgatatccgcatccgcaggcacgttttctatggcgtaatgttttacttcaattgccagccccgctttttccaggcgtttacggaaggtggtcgcgcccatcgcactggagcccatccccgcatcgcaaacaaaggcgatacgcttaaccctgcttaagctgaatgcaccctcttgtttcatcgccttaaccgcattggcactctgagcaaactcatcttcgctctccgtttccaccgttttttccatcttcagtatcaggctagtaatagcaaaggacaccagggtacctaccgtaacaccggcaattgtcgccaggaagctgcctttcggcgtcagtgccaggtaagcaaagatagaccccggacttgggccagccaccagaccaccgtccagtaagttaaacatccaggtgccagacataccgcccgcaatcatggcaataatggtcagcggcttcatcagcacatacgggaaatacagttcgtggatcccaccgaggaagtgaataatcatcgccccgggcgcagaacgtttactcatccctttaccaaacaaggtaaacgccagcagcagccccaggcccggacctgggttagaggccaccataaagaagatggatttaccgttaacgctagcctgttgcattcccagcggataatagacgccctgatcgatcgcattattgaggaaaagcactttcgccggttcattgatgacactcaacaatggcagataacccgcatgtaccagcgcctcaatacactctttgacgaaagtattggcaattaacaccgccgggccgataacttcaaaacccagcagacaaaggagcatccccgcgatacctaaactgaagttattgataaccatctcaaaaccggcaggtatgcgtttttccagtgccttatcgacatattttatgaccaacccaccgagcggccccatgatcatactgccaaggaacatcgggatctctgcgccaacgatcacaccaatagtacctattccgcccatgaccgccccgcgtttaccgccgaccagatgaccacctgtagaaccaatcatcacgggcaataaataggtaatcatcgggccgacaattttggcgaaatgttcgttaggcagccaaccggtgggaataaataacgcagtaataaaaccccaggcaataaaagcaccaatattggggatgaccattgcagtcaaaaagcccccaaaagcctggacctttgcacgagcagacttgttttccataatattatcctgtagaggagagagtaattatccgcggctgataatgtccgctaattgtttttcactacttgctgttaagagttgttcgagtatttcttcttcgcacagtaattcacttaacgcctgaatagcgccaatgtggctatcggcatcggcagcagagagtccgatgagtaatttaattggttcgtcattccccggaaaataaacaccttgttcaagtaatgtcaaagacatcccggttttaagcgccccacattccggtcgcgcatgaggcattgccacgcctggtgcgagaatataataagggccattgttaatggtggaatctttaattgcctgaatgtaattctcgctgatatagtttttatccagcaaacttaccatgctgaaatcgatagcttcctgccaatcttttgcactatgtataacactgatactactttctggaaaataatcactaagccgcataaattatccttattttatttttagggtaccgtccggcggtaaaaataaaatactcgtgcggtttaatgaaagcaattgagcagggaaaccggtgttttgaaaacagtgaattattaatttcttatataacattgagttatagatataacaacaaatgtcaatacgcatatcgtgatgcatattacataattgatatttattgcatataaatatttgtgatctacaacacgccttatctattgcttgtccgcaaacggacatatcaaggtaataaaaaaggtcgccgaagcgacctttttacccgaaatgctaattacagcagttcttttgctttcgcaacaacgttatcaacagtgaagccgaactcttcaaacagcagctctgccggagcagattcaccgaaggtggtcataccgacgatagcaccgttcaggccaacatacttgtaccagtagtcagcaatacccgcttctacagcaacgcgtgcagtaaccgctttcggcagtacggattcacggtaagcagcatcctgcttgtcaaatgcgtcggtagacggcatggacaccacgcgcgctttcacgccttcggcagtcagtttttcgtaggcagcaacagccagttcaacttcactaccggtagcgatgaaaatcagttccggctgaccggcgcagtctttcagcacataaccaccgcgcgcgatgtttgccagttgctcttcagttcgttcctgctgcgccaggttctgacgggagaggatcagtgcggtcgggccgtcctgacgctcaacaccgtatttccacgcgaccgcggattcaacctggtcacacggacgccatgtagacatgttcggggttacgcgcagagaagcgacctgctcaaccggctggtgagtcgggccgtcttcgcccagaccgatggagtcgtgggtgtaaaccatcacctgacgctgtctcatcagcgcagccatacgtacggcgttacgtgcgtattccacgaacatcaggaaggtggaggtgtacggcaggaagccaccgtgcagggagataccgttagcaatcgcggtcataccgaactcgcgaacaccgtagtggatgtagttacccgcagcatcttcgttgattgctttagaaccagaccacagggtcaggttagacggcgccaggtcagcagaaccgccgaggaattccggcaacagcggaccgaacgcttcgatagcattctgagacgctttacggctggcgattttcgccggattagcctgcagtttagcgatgaactctttcgctttagcgtcgaagtcagacggcatttcgcctttcatacggcgggtaaattcagcggcttcctgcggataagctttcgcgtaagcagcgaatttctcgttccatgcggattctttcgcctggcctgcttctttcgcatcccactgagcatagatttcagacgggatttcgaacggcgcatatttccagcccagttgttcgcgggtcagggcaatttcagcgtcgcccagcggcgcaccgtgggagtcgtgggtaccggctttgttcggggaaccgaaaccgatgatggttttgcacatcagcagggaaggtttgtcagtcactgcgcgcgcttcttctactgcgcgtttgatagatgccgcgtcatgaccgtcgatgtcgcgaataacgtgccagccgtaagcttcgaaacgcattgcggtgtcgtcggtgaaccagccttcaacgtgaccatcgatagaaataccgttgtcatcgtagaatgcaatcagtttacccagcttcagcgtacccgccagagagcaaacttcgtgggagatgccttccatcatgcagccgtcgcccatgaaggcgtaggtgtagtggtcgacaatgtcgtggcccggacggttaaactgcgccgccagcgttttttctgcaatcgccataccgactgcgttggcaataccctgacccagcggaccggtggtggtttccacaccagcggtgtaacccacttccgggtgacccggagttttagagtgcagctgacggaagtttttcagttcttccatcggcagatcgtaaccggtgaggtgcagcaggctgtagatcagcatggagccgtggccgttggacagcacgaagcggtcacggtcagcccaggacggattctgcgggttgtgtttcaggaaatcacgccacaggacttcggcaatgtcagccatacccataggggcacccgggtgaccggatttggctttctgtactgcgtccatgctcagcgcacgaatagcattggcaagctctttacgactggacattttgactccagatcggatgatgaagggcacgcccttaacgacttgacgacagcgcgttttgggctacgccggaaaatttgccaacaatttaccacaagccgcgcgtcatgtacatggaacatccttttgccgcttcagaaatctctggatcatgctcgcatgttgcgcaatctactcgcccgtccgctgcgcttttccttatactgagactgagcgtcgattcacctgcaaacggcgcatttttagaataatcctgaccttgtgcggaagagaaaacatgaaaattcgcgccttattggtagcaatgagcgtggcaacggtactgactggttgccagaatatggactccaacggactgctcagtagtggagcggaagcttttcaggcttacagtttgagtgatgcgcaggtgaaaaccctgagcgatcaggcatgtcaggagatggacagcaaggcgacgattgcgccagccaatagcgaatacgctaaacgtctgacaactattgccaatgcgctaggcaacaatatcaacggtcagccggtaaattacaaagtgtatatggcgaaggatgtgaacgcctttgcaatggctaacggctgtatccgcgtctatagcgggctgatggatatgatgacggataacgaagtcgaagcggtgatcggtcacgaaatggggcacgtggcgttaggccatgtgaaaaaaggaatgcaggtggcacttggtacaaatgccgtgcgagtagctgcggcctctgcgggcgggattgtcggaagtttatctcaaagtcaacttggtaatctgggcgagaaattagtcaatagccaattctcccagcgccaggaagcagaagccgatgattattcttacgatcttctgcgccaacgcggcatcagcccggcaggtcttgccaccagctttgaaaaactggcaaaactggaagaaggtcgccaaagcagtatgtttgacgaccatcctgcatccgccgaacgcgcccagcatattcgcgatcgcatgagcgcggatgggattaagtaaagcctggtggtgtcgaacgtaggtcagataaggcgttcacgccgcatctgacatgaatggcacatttgttaccttgtgcgcattgccggatgcgatgctggcgcatcttatccggcctacgggtgccgaacgtaggtcggataaggcgttcacgccgcatccgacattaatggcacgttttacccgtgcgcatcgcatctggtgcttactcgccctttttcgccgcctgaatatacagcatttccagcgccagcgttgccgctgccagagcagtgatttcgctctgatcgtatgccggagccacttccactacgtccatcccaacaatgttgagatctttcaggccgcgtaccagtttaatagcgcgatcggaggtcaggccgccaatcactggcgtaccggtgcctggtgcaaaagcaggatccaggcagtcgatatcaaaagtcaggtaaaccggcatatcacccacaatctgtttcacttgggcgataacgtcatccacgctgcgatcgttcacctggcaggcgtccagcacggtaaagccgttgtctttatcaaactcggtacgaataccaatctgcacggaatgattcgggtcgatcagaccttctttcggcgcggtatagaacatagtgccgtggtcaaattcacaaccgttcgcataggtatcggtgtgggcgtcaaagtgtaccagcgccattttgccgaaatgcttcgcatgagcacgcagcagcggcagcgtaacaaagtggtcaccaccgaaagagagcatacgcttaccggcagccagcagcttctcggcgtgcgcctgcagcttttcgctcatctcacgggcatcgccaaaggcatataccagatcgccgcagtccacgacgttcagacgctcacgcatgtcgaaattccacgggaagcggttgtgttcccaggccagattcgtgctaacctgacggatcgctgccggaccgtggcgaccacccgcacgaccagaagtggccatatcgaacggcacgccagtaatcacccagtctgcatcgctgtcatacggctggaagttcatcggcaggcgtaaaaaaccaaaggcattggaaaccagactgttatcgtattgatgacctaaggtgctcatggatggactcctattacaaagtcgatataaaaaaacccttccgcgtcgttaggcccgacgaggaagggttggatttgtcacaataaattgtggcggattatcaccgctaaattaagcggattcaagtaacacaggacttactcatcttcaagataagtataaccgtacaaacctgcctcgaactcttcaaggaactgttgttgcagttcagcatcaagatcggttttcttcacttgatcgcggaactgggttaacagcgttttcggatcgagctgtacatattgcagcatgtccgccacggtatcgccttcgtcagacagttctacttctacgctaccgtcagggaagacgaacacgtcaaccgcttcggtatcaccgaacaggttgtgcatgttgccgaggatctcctgatatgcgccgaccataaagaaaccgagcatcggcggattctctggatcgtactccggcattggcattgtcgtggcaataccgtcaccatcaatatagtggtcgatagcaccgtcagagtcacaggtaatatccagcagcacagcgcgacgttccggcacttgatccagcccttccagcggcagaaccgggaacaactggtcgatcccccatgcgtccggcatgctctggaacaggctgaagttgacgtacattttgtccgccatacgttcctgcagctcgtcgataatcggacgatgagcacggttttgcggatccagctgcttttgcacttcatggcacatgctcaaataaagctgctcagcccatgcacgttcttgcaggctaaagatgccggaagagtagccgatatgaatgtcgtgcagatccatctgactgtcgtgtaaccattcacgcagagaacggcgagttcccggttcgtgcatctcctgccaggtttcccacatgctttgcagcgcgcgcggcgcatcttctgcaggcgcggtcggcaccgtgtattcgttacgttccacgccgatgatattagacaccagcacggtgtgatgcgcagtcaccgcacgaccgctttcggtgattaccgtcggatgcggcagaccgttttcttcacacgcatcgccaatcgcccagataatgttgttggcgtattcattgaggccgtagttcacgctacagtcggactggctacgagtaccttcataatccacgcccagaccgccgccgacgtcgaagcactgaatattgacgcccagcttgtgcagttccacatagaaacgcgcggattcacgaacgcctgtcgcgatatcgcgaatattcgccatctggctaccgaggtggaagtgcagtagttgcaggctgtcgagacgcccggcttcacgcagggtttcaaccagttgcagtacctgagtcgcagccaggccgaacttgcttttttccccgccggaggactgccatttaccgctaccctggctagccagacgtgcacgcacgcccagacgaggaacgacattcagacgttctgcttcatccagcacaatggcgatttcactcatcttctcaatgaccagatagaccttgtgccccatcttctcgccaattaatgccaggcggatatattcgcggtctttataaccgttgcagacgatgacgctacgggtcatgccagcatgtgccagtactgccatcaactcggctttggaaccggcttccagacccagcggttcgccgctatgaatcagggactcaatcacgcggcggtgctggttaactttgatcggataaacaaggaagtaatcgccgttatagccgtaggattccctcgcacgtttgaacgcggcgttaatggaacgcaaacggtgctgcaggatctgtgggaaacagaacagtgcaggcagacgctggccctgtgcttcacgagttttcactaactgcgcgagatcgacgcgagcttccgggacgtccgggtccgggcacacgctaatgtggcccagctcgttaacgtcatagtagttattgccccaccaggcaatattgtaagtacgcagcatcttgctggcttcctgggagctcattgcaacctcctgcatggagcgtagtacaccgtgttcgcccgcactgctaggcaaacccatagacatgtcgtcagacatagcgaacctcaaattattttattaagtgtaaaacagttaacgactatcgcagcctggaactggcttaacaacccataagcacatggattttccagcagactatgctgacgctccaactgcgcaaccggtttctttttcataacattattaagcacataaccgaacgtaagtgtgaaagttcggcgaaaccacgagaaaactcttgtttttacaagagcgcccttgttcagtcctcagtaactgtaaccagctcttgaatcctgagaagcgccgagatgggtatagcaagcgcaggtatgcaaagcagagatgcagagtgcggggaacgaatcttcaccagaacggtgagacaggttaagcagcagacaacggttcattatttcgtaagtcctccacggccgcctgttaagacgaacccacaagccaaaactctgattagtacccggctggaagtggcaacacgaaagaaacgtcgtgtgctttttatttaagccgcgcgccgcgttttataccccacaatggcagaaaattgcaaaagataaatacgcagaatgccggcattgtcaggaaaaatttccagccacgtttttaacagaatgagacagctttcaaaaaaaagtggaaatagggtgaagaattgacctaaaatagccatccagatgttaatccatccataccgattaacactcagactgccagtgtttttaacctgcagagtcgtggtaggatccgctaccacagaaaatccacacaacagtttgagctaaccaaattctctttaggtgatattaaatatggcaaaacacctttttacgtccgagtccgtctctgaagggcatcctgacaaaattgctgaccaaatttctgatgccgttttagacgcgatcctcgaacaggatccgaaagcacgcgttgcttgcgaaacctacgtaaaaaccggcatggttttagttggcggcgaaatcaccaccagcgcctgggtagacatcgaagagatcacccgtaacaccgttcgcgaaattggctatgtgcattccgacatgggctttgacgctaactcctgtgcggttctgagcgctatcggcaaacagtctcctgacatcaaccagggcgttgaccgtgccgatccgctggaacagggcgcgggtgaccagggtctgatgtttggctacgcaactaatgaaaccgacgtgctgatgccagcacctatcacctatgcacaccgtctggtacagcgtcaggctgaagtgcgtaaaaacggcactctgccgtggctgcgcccggacgcgaaaagccaggtgacttttcagtatgacgacggcaaaatcgttggtatcgatgctgtcgtgctttccactcagcactctgaagagatcgaccagaaaagcctgcaagaagcggtaatggaagagatcatcaagccaattctgcccgctgaatggctgacttctgccaccaaattcttcatcaacccgaccggtcgtttcgttatcggtggcccaatgggtgactgcggtctgactggtcgtaaaattatcgttgatacctacggcggcatggcgcgtcacggtggcggtgcattctctggtaaagatccaagtaaagtggaccgttccgcagcctacgcagcacgttatgtcgcgaaaaacatcgttgctgctggcctggccgatcgttgtgaaattcaggtttcctacgcaatcggcgtggctgaaccgacctccatcatggtagaaactttcggtactgagaaagtgccttctgaacaactgaccctgctggtacgtgagttcttcgacctgcgcccatacggtctgattcagatgctggatctgctgcacccgatctacaaagaaaccgcagcatacggtcactttggtcgtgaacatttcccgtgggaaaaaaccgacaaagcgcagctgctgcgcgatgctgccggtctgaagtaatctttcttcacctgcgttcaaaggccagcctcgcgctggcctttttcttttggataggcgttcacgccgcatccggcaaaaaaaccgcccgcacaataacatcattcttcctgatcacgtttcaccgcagattatcatcacaactgaaaccgattacaccaaccacaacagacaaagatttgtaatattttcatattattattcggttttcacagttgttacatttcttttcagtaaagtcttaattgcagataacagcgtttaatctatgatgatataactcaattattttcatgcacttaaatcataactaagataaatgttagtgtaagcgattacactgatgtgatttgcttcacatctttttacgtcgtactcacctatcttaattcacaataaaaaataaccatattggagggcatcatgcctgacgctaaaaaacaggggcggagtaacaaggcaatgacgtttttcgtctgcttccttgccgctctggcgggattactctttggcctggatatcggtgtaattgctggcgcactgccgtttattgcagatgaattccagattactagccacacgcaagaatgggtcgtaagctccatgatgttcggtgcggcagtcggtgcggtgggcagcggctggctctcctttaaactcgggcgcaaaaagagcctgatgatcggcgcaattttgtttgttgccggtagcctgttctctgcggctgcgccaaacgttgaagtactgattctttcccgcgttctactggggctggcggtgggtgtggcctcttataccgcaccgctgtacctctctgaaattgcgccggaaaaaattcgtggcagtatgatcagcatgtatcagttgatgatcactatcgggatcctcggtgcttatctttctgataccgccttcagctacaccggtgcatggcgctggatgctgggtgtgattatcatcccggcaattttgctgctgattggtgtcttcttcctgccagacagcccacgttggtttgccgccaaacgccgttttgttgatgccgaacgcgtgctgctacgcctgcgtgacaccagcgcggaagcgaaacgcgaactggatgaaatccgtgaaagtttgcaggttaaacagagtggctgggcgctgtttaaagagaacagcaacttccgccgcgcggtgttccttggcgtactgttgcaggtaatgcagcaattcaccgggatgaacgtcatcatgtattacgcgccgaaaatcttcgaactggcgggttataccaacactaccgagcaaatgtgggggaccgtgattgtcggcctgaccaacgtacttgccacctttatcgcaatcggccttgttgaccgctggggacgtaaaccaacgctaacgctgggcttcctggtgatggctgctggcatgggcgtactcggtacaatgatgcatatcggtattcactctccgagcgcgcagtatttcgccatcgccatgctgctgatgtttattgtcggttttgccatgagtgccggtccgctgatttgggtactgtgctccgaaattcagccgctgaaaggccgcgattttggcatcacctgctccactgccaccaactggattgccaacatgatcgttggcgcaacgttcctgaccatgctcaacacgctgggtaacgccaacaccttctgggtgtatgcggctctgaacgtactgtttatcctgctgacattgtggctggtaccggaaaccaaacacgttagcctggaacatattgaacgtaatctgatgaaaggtcgtaaactgcgcgaaataggcgctcacgattaatctccccaagcttcctcccatcgcggaggaagccacctcttgcagtcatcttttcttcgctctatcctctgccgctatgaaaacatcccgtctccctatcgccatccaacaggccgttatgcgtcgcctgcgggaaaaactcgcccaggccaacctgaagctagggcgtaactacccggagccaaaactctcttacacccagcgcggaacctccgccggaacggcctggctggaaagctatgaaattcgcctcaatcccgttttgctgttggaaaacagtgaagcttttattgaagaagtggtaccgcacgaactggcacatttgctggtatggaaacatttcggccgcgtagcgccacatggcaaagagtggaagtggatgatggaaaacgtgctgggtgttcccgcccgtcgtacgcatcagttcgaactgcaatccgtgcgtcgcaacaccttcccctaccgctgcaagtgccaggagcatcagcttaccgtacgccgccataatcgcgtagttcgtggcgaggccgtctatcgctgtgttcactgcggtgaacagctggttgcgaaataaccatctgaactatcaggaactttcctgatttggctgattgcataccaaaacagctttcgctacgttgctggctcgttttaacacggagaagtgcctacactagcgggattctttttgttaacccctaccccacgcgtacaaccgcgtggggagacgacgcggatttttaactatgcgtatcccccgcatttatcatcctgaaccactgaccagccattctcacatcgcgctttgcgaagatgccgccaaccatatcgggcgcgtactgcgcatggggccggggcaggcgttgcaattgtttgacggtagcaaccaggtctttgacgccgaaattaccagcgccggcaaaaaaagcgtggaagtgaaggtgctggaaggccagatcgacgatcgcgaatctccgctgcatattcacctcggtcaggtgatgagccgtggtgaaaaaatggaatttactatccagaaaagcatcgaactcggtgtaagcctcattacgccacttttttctgagcgctgcggcgttaaactggatagtgaacgtctgaacaagaagcttcagcagtggcagaagattgcaattgctgcctgtgagcagtgtggtcgtaaccgggtgccggaaatccgtccagcgatggatctggaagcctggtgtgcagagcaggatgaaggactgaaactgaatcttcacccgcgcgccagtaacagcatcaatacgttgccgttaccggttgaacgcgtccgcctgctgattggcccggaaggcggtttaagcgcagatgaaattgccatgactgcccgctatcaatttactgatatcctgttgggacctcgcgttttgcgtacagagacaactgcgctcaccgccattaccgcgctacaagtacgatttggcgatttgggctaacggagaagaataatgatcaagctcggcatcgtgatggaccccatcgcaaacatcaacatcaagaaagattccagttttgctatgttgctggaagcacagcgtcgtggttacgaacttcactatatggagatgggcgatctgtatctgatcaatggtgaagcccgcgcccatacccgcacgctgaacgtgaagcagaactacgaagagtggtttagcttcgtcggtgaacaggatctgccgctggccgatctcgatgtgatcctgatgcgtaaagacccgccgtttgataccgagtttatctacgcgacctatattctggaacgtgccgaagagaaagggacgctgatcgttaacaagccgcagagcctgcgcgactgtaacgagaaactgtttaccgcctggttctctgacttaacgccagaaacgctggttacgcgcaataaagcgcagctaaaagcgttctgggagaaacacagcgacatcattcttaagccgctggacggtatgggcggcgcgagcattttccgcgtgaaagaaggcgatccaaacctcggcgtgattgccgaaaccctgactgagcatggcactcgctactgcatggcgcaaaattacctgccagccattaaagatggcgacaaacgcgtgctggtggtggatggcgagccggtaccgtactgcctggcgcgtattccgcaggggggcgaaacccgtggcaatctggctgccggtggtcgcggtgaacctcgtccgctgacggaaagtgactggaaaatcgcccgtcagatcgggccgacgctgaaagaaaaagggctgatttttgttggtctggatatcatcggcgaccgtctgactgaaattaacgtcaccagcccaacctgtattcgtgagattgaagcagagtttccggtgagcatcaccggaatgttaatggatgccatcgaagcacgtttacagcagcagtaacccaccttagcgagaaggatctcgttgagactctgagtgacagcgcccttctttccacgcatactgggcgctgttgcttttttgaaccaggaaacagaacctctgacaatgaatttacagcatcactttcttattgccatgcctgctctccaggatccgattttccgtcgttccgtggtctacatttgcgaacataataccaatggtgcaatggggatcatcgtcaacaagccgctggaaaatctcaaaattgaagggattctggaaaagctgaagatcacgccggagccgcgtgatgaaagtatccgtctggataaaccggttatgctcggcggtccgctggctgaagatcgcgggtttattttgcatactccgccctccaattttgcttccagcattcgcattagtgacaacacggtaatgaccacttcccgcgatgtgctggaaacgctcggcaccgataaacaaccgtctgacgtattggtggctctgggttatgcctcctgggagaaaggtcaactggaacaagaaattctcgataacgcgtggctaacggccccggcagatctgaatattctgttcaaaacgccgattgccgaccgctggcgcgaggcggcaaaactgattggtgtggatattctcaccatgcctggtgtggcaggacacgcctgatgagtggaaccttactcgccttcgacttcggcaccaaaagcattggcgtagcggtcggccaacgcattaccggcaccgctcgccctttgcctgcaattaaagcacaggacggtacgccggactggaacattatcgagcgtttactgaaagagtggcagccggacgaaatcatcgtcggtttgccgctgaatatggacggcaccgagcaaccattgactgccagagcgcgtaaatttgccaaccgtattcatggccgtttcggtgttgaagtaaagctccatgacgagcgtcttagcactgtggaagcccgttccggtctgtttgaacagggcggctatcgggcgctcaacaaaggcaaagttgactctgcctctgcggttattattctcgaaagctatttcgagcagggatattaaggcgatttaaacgcctggcggagtgtaaataatatcatcgcgtcttattgccggatgcggcgtgaacaccttatccagcacacatctggcagcggctataggtctgataagacgcgttagcgtcgcatcagacatttattgcctttgtaggcccgataagcttgcgcatcgggcatggcaacgtcacaaacgcccttcccccacccggtgctgataactctgctgaaacgttatcatccccacctgctgcccggtttgaataacatgcggtaactggtgggttttcccttcgcgaatcaaattccccaccgcgggtgtgttaatcagcaattcaaatagcgccacgcgtccttcctgtttatccacttccagcttttgactcagcactgcccgtaaactacctgccagttgattacgcacggggtctttttcctgcgccggaaaactatccaccagtcgctcaactgcctgcgcggcaccacgcgtatgtaatgttgccagcaccaaatgcccggtttctgccgccgtcagtgccagacggattgtctcgctgtcacgcagctctccgagcaaaatcacatcaggatcttcccgcaatgcggcccgcaatccgcttgcgaacgtcatacagtgcaaaccaatttcccgctgctggatcaaacatcgctggctggcatagagatattcaacaggatcttccagcgtcagaatatgcgcatcggcatgttgattgagatagccaaccatcgccgccagcgtggtagatttgccactccccgtcgcccccgtcaccagaatcaggccattctcgctcttgagtaattccggcaataccgttggtgcgccaagctgttcgagctgcgggcagtggctaggtaacagccgtaacgccaggctaatgccatgccgttgcgcgaatgcgctgccacgcaatcgctggttttccgccaggctcacggcaaaatccagctgaccattctccagcaatattgcccgctgatcgtcatccagccactcccgcagtagctcttcgacgtccggcgtatcaaacggcgcagcttccattctgccgcgaatgcgccatcgtgcgggccaggcgctgcacaggtgtagatcgctgacgttatgctttacactaagggccacaatttcttccatattcatactaagatcctcggaaaatgaacgatattgcgcataacctggcacaggtccgggacaaaatcagtgcggctgcaacgcgttgcggccgttctccagaagaaattacgctgcttgcagtcagtaaaacaaaacctgcgagcgccatcgcagaagccattgatgccgggcagcgtcaatttggtgaaaactacgttcaggaaggggtagataaaattcgccactttcaggaactgggcgtaacaggattagaatggcattttattggcccgttgcagtctaataaaagccgcctggtggcagagcatttcgactggtgtcataccatcgaccgtttgcgcatcgctacccgtctcaacgaccagcgcccggcagaacttccccctcttaacgttctgattcaaattaacattagtgatgaaaacagtaagtccgggattcaactggctgaactggacgagctggcagctgcggtcgctgaactaccgcgtttacgtctgcgcgggttgatggcaatccctgcgcctgagagtgaatatgtaaggcagtttgaagttgcacgccaaatggctgtagcatttgccggactgaaaacgcgctacccgcatatcgacacgctctctctgggaatgagcgacgatatggaagccgccattgcggcaggtagcacgatggttcgtatcggcactgcaatttttggtgcgcgtgattactctaaaaaataaggaattaaaggaacgccatgaatacgttgactttcctgcttagtacggtcattgagctgtataccatggtgctgttattacgcatctggatgcagtgggctcattgtgatttttacaaccccttcagtcagtttgtagtgaaggtaacgcagccaattatcgggccactgcgccgcgttattccggcaatggggccaattgacagcgccagcctgctggttgcctatattctcagttttatcaaagccatcgtgctgtttaaagtggtgaccttcctgccaatcatctggattgccggtttactgattctgctgaaaaccatcggcctgctgattttctgggtcctgctggtgatggcgattatgagctgggtaagccaggggcgtagcccgattgaatacgtgctgattcagctggccgatccgctgctgcgcccgattcgccgcctgctaccggcaatgggtgggattgatttcagcccgatgatcctcgttctgctgctgtatgtcatcaatatgggtgtcgcagaagtattacaggcaaccggaaatatgctgctgccagggctgtggatggcgttatgaatgccgtaacagttaatgatgacggtctggttttacggctctatattcagccgaaagccagccgtgattctattgtcggtttacatggcgacgaagttaaagtcgccattaccgcgccgccggttgacggccaggccaacagtcatctggtgaagtttctcggtaagcaattccgggttgccaaaagccaggtggtgattgaaaaaggcgaacttggccgccacaaacaaattaaaatcattaatccgcaacaaatcccgccagaaatcgcggcgttaattaattaagtatcctatgcaaaaagttgtcctcgcaaccggcaatgtcggtaaagtgcgtgagctggcgagcctgcttagcgacttcggtcttgatatcgtggcccaaacagacctcggcgttgattccgctgaagaaaccggcctgacctttatcgaaaacgcgattctgaaagcgcgccatgcggcaaaagtgaccgctttaccggcaattgccgacgactctggtctggcggtagatgtgcttggcggcgcgccgggcatttactccgcgcgttattccggtgaagacgcgaccgatcaaaagaatctgcaaaaactgctggaaacaatgaaagacgtaccggacgaccaacgtcaggcgcgtttccactgcgtgctggtatatctgcgtcacgcggaagatcccactccgctggtatgccacggtagctggccgggcgtgattactcgtgaaccagcgggcactggtggctttggttatgatccaatcttcttcgtaccttccgaagggaaaaccgccgccgaactgacccgcgaagaaaagagcgccatttcccaccgtggtcaggcgttgaaactgctgctggacgctttacgtaatggttaaattacctccgctgagtctctacattcacatcccgtggtgcgtgcagaaatgcccgtactgcgatttcaactctcacgcgttgaaaggagaagtgccgcacgacgattatgttcagcatctgcttaacgatctggacaacgatgtggcttacgctcagggccgtgaagtaaagacaatctttattggcggtggtacgccgagcctgctttccggcccggcgatgcaaacgctgctggacggcgtgcgtgcgcgtttgccgctggcagcggatgcagaaattactatggaagcgaaccctggcacggtagaagccgatcgctttgtcgattatcagcgtgctggtgtgaaccgcatctctattggtgtgcagagttttagcgaagaaaagctgaaacgacttgggcgtattcatggcccgcaagaagcgaaacgcgcggcgaagctggcgagcggtttagggttacgtagctttaaccttgatttgatgcatgggctgccggatcaaagtctggaagaggcgcttggcgatctacgccaggccattgaactgaatccgccgcatctttcctggtatcaactgaccatcgaacccaatacgctgtttggtagccgaccaccggtgctgccggacgatgacgcgttgtgggatatattcgaacaggggcatcagttattaaccgcagcgggttatcagcaatatgaaacttccgcttacgccaaacccggttatcagtgccagcacaatctcaactactggcgctttggtgactacatcggtattggctgcggcgcacacggcaaagtgaccttcccggatgggcgcattctgcgtaccaccaaaacgcgtcatccgcgtggttttatgcaaggaaggtatctggaaagccagcgtgatgtcgaagccacagataagccgtttgagttctttatgaatcgcttccgtctgctggaggccgcgccgcgcgtggagtttattgcgtataccgggctttgcgaagatgtgattcgcccacagttagacgaggcgattgcccagggttatctcaccgaatgtgcggattactggcagataacggaacatgggaagctgtttttaaatagcctgctggagctttttctggctgagtaaacttgtattgccggatgcggcgtgaacgccttatccagccgacatgtggcagcggttgtaggtctgataagacgcgcaagcgtcgcatcagacgttgattgccggatgcggggtcaacgccgcatcctgctacaaatcgtgcactatatcaaacttacttaatcaccccattgcgccgcagttgttcggtatcttttttccagcgttcattagcttggttgatatcgtcaattttcatcaaaatcgcgacttttttactgtttatttcactaactttcatcgttaacggatattgccctttttcgagcgttacccagtcatcctgcaatttacggctaagtttttgactttgcagaaaagtctgtcgccgttgttcgttgatatcgaaatctcgtttctgctgaatcggcacttcataacactcttcactctgtttatgacatgccgcaatcgccggttgataaacctctttgtcatatttaaccgcgaacgcctcgctatcgttctgtttattaaactcatcacgctgttggtgaatttttttaaaggcgtcttcgcgggtcatttgcttaccgtttgcatcttttccccaatatgcatccgctgctttctgcgccgccaccatttgcttatcaagcgctttcacttccttttccagcgcaggaatgctgttcttctgggtattcaacgcagattcaagctgactaaagcgataattgaaatcttcgctattcacgatcagatatttattattcgttttgatatcgtcgaccacccgcccacgatcgctggctgccgcctgaaaagagtaaaagttcacgctccagccagacgcgggcgttcctttactggttaacatcgcgctgaattttaccggtttatctttcgtccaggtctgttcgagcagttcgtaatctgccaactgaccgacccaggtatagagatcgtcactggaagagacatcgccttccgcactccaggtggcctgattacccttagcatcaagattttttaaggtgatagcatcaagcttgagaatgccgtgatactgctttttgaattgatcttttaagatattttcagttggcggttcgccatctgcccaggcattaccagtcatcaacataagcagtgccgtgccaacaatccattgctttttcacccgaaaaacctcacgcggaataatttattccggtgattatcattagggtaattaaaattggcaatggacgtgagtctgaagtgaaaaagccccggcacgataccggggcgaggcgattagtactgattgaagatctgctggatctgctgcggatctttggtttgcgtcagagccagttgcagcagaacgcgcgctttttgcgggttcagcgtgccagaggcgacgaagccgtatttcgcatcatccacttcggcatcctgagtggtagcgcccgtcggtacgcgggaagaacgcacgactgcagtaccggttttcgcggcggtcgccagcgtgccgaacacagatttatacaggttgccgttacccacaccagcgctaacgatgccatcatagcccgcatctaccagtgctttagccggaagatcggatgcgttagcgtagttataaacaatgccgactttcggcagttcattcagcttagagacatcgaatggcgtgtcgctggtatgcttacgtgccggggtacgctggtagtcaatcttaccgttgtgaatgtaacccagaggaccgtagttaacagacttgaaggtcgctacgtcggtggtgttggttttggtgacgtcacggccatcaagcacggtgtcattcatcactaccagcacgccacggttggcggaggctttatcagctgcggtcactaccgcgttatacaggttgaatggaccgtctgcgctcatagacgtggacggacgcattgcgccgaccatcaccaccggtttgtcgcatttcaccgtcaggtcgaggaagtaagcagtttcttccatcgtgtcggtaccgtgggtaatgacgaagccgtcggtcttatcgcagtcggtgttaatttttttcgccagtgtcagccagacattatcgttcatgtcctgggagccgatattcactacctgctcgcctttaacgttcgcaatgtcttttagttgcggcaccgcattaaccagattttctacgccaactttacccactgtgtagttagatttggttgcggagtcaccaccaccggcaatggtcccgccggttgctaaaatggtgatattgggtaatgccaatgctgcaccactaaaacccataaccagtgcggcaagtgccgtctttttgaaaaactccatttcattcctccagttacgtgaacgctacgcattatcccttagctctgtatgggaaatttgacgttaaacaatttacaacgtgaatatattttggagatctacaaagttagaggcaggtaacaaaacgaagaattaaacggcataaaaaagtattatgccgtcttaaaatagaggattattttaaattcccgaccagggctttgcggctatcttccagagtcacaacgcggctacaaacatctttgccaaactgctggaaatctttttcctgctttttccactcggtttggatactggattgcagcccccccaggcttcccagcacattctgtaatgggttaccgccgctttttcagcaccgctttcgcgcccatttcattaatgctgtcctgtaaaattccacccattgcctgattcactaattgctggccttcggcgcgaacctgatcaatggctttatagtgaaacgtcaggccatcgctgcgcgtttcaataatgcggttcatctgctctttcagctgcgcatcaagtttggtcagacggctgcgcattttgctgctttcgcccatctcctgaacgataattttatccagagcaatacgggctttctcgacgcggcttttcgcgccttcatcaatccacggcagcgtgctgcgtagttcagcctgataatccttcgcctgctcgcgctgggcggcattcagggaatattgcttaccgttatacatcacgttgccgtctggcgtgatcaccagattgccgttttcgcccttcacctgcacggtttgcgggctgacaatcacatcgtcacgcggcgtgacgctgcactggtagtcggcgtgagcggtcattgccgtcacactaagtgctgccgccagcagcattttgcgcatcatagtcttccctcaagaaaaaatcaggccagcatttgctggccccagattgataacaaagtacgcgttttccatgccggatgcggcgtaaacaccttatcccgcctactcgatcgtgcatctttccaggcctgataagcgtagcgcatcaggcagttttgcatttgtcatcgcccgtatgctttcttagtcccaccaaacgtcgaaaagttcgctggtgcgtacctcatccagtttgcgctcttccagccacttacgcacaatcgcctgatgttcttcggtgcatttgccgatttcctgcatgcagatcagaccttcccaggccagataaccgctgccgtcaaaggccagtttgttcggttcgataacctcgttaataaaatcatcaacggttttatcaatctgttcttcgcttgtaccttccgggaatcgccatgccacgctaaatcctaattcctggaattcgtcgatgtgcatttttttacgcagacgacggctacggttctttgccattatttcaccctctcgaacattaagtcccatactccgtgaccaagacgatgaccacgttgttcaaatttcgtcaccggacgacttgccggacgcggtacgtaatcattgctctcactcaggtttttataaccgtcaatagaagacatcacttcaagcatatgttccgcataaggttcccagtcggtcgccatatggaatacgccccccagctgcagtttgctttttaccagttcggcaaacggcacctgaacgatacggcgtttattatggcgcgctttgtgccacgggtcagggaaaaagagctgcaccatgcgcaaactattgtcaggaatcattttatgcagcacttcaaccgcatcgtgacacatcacgcgcaggttgcttaaaccttcttcatgcgcagaagccaggcacgcaccaacgcccggactatgcacttcaatgccgaggaagtcctgctcagggcgatctttagccattgccaccaggctcgcccccatgccaaaaccaatctcaagcgtcaccggcgcttcacggccaaaaagcgcggggaaatccagcatatcttcgctgaactcaacgcccatcaccggccagtagttttccagcgcatgttcctggcctttggtcagtcgcccctggcggcgcacaaaactacggatacggcgcagtgggcggccgttttcatcaaattccggactaatgacgtcgtttttcataaaggtttagtcgcttgtgaaagtgttctgaaaacgggcattatccaaagttagttgccggatgcaagcatgataaggccgtggctgcggaaagttccggtttacaccctgccgtcgctgtgctgcaatcttgcccccaacaacagtgaattcggtgaccatgcaagcgagccaatttagtgcccaggttctggactggtacgataaatacgggcgaaaaactctgccctggcaaattgacaagacgccctacaaagtatggctcagtgaagtgatgttgcaacaaactcaggttgcgaccgttatcccctattttgaacgctttatggcgcgcttcccgacggtgaccgatctcgccaatgcgccgctcgacgaagttctccacttgtggaccgggcttggctattacgcccgcgcgcgcaatctgcataaagcggcacaacaagtggcgaccttacacggcggtaaattcccggaaacctttgaggaagttgcagcactgccgggcgtcgggcgttccaccgcaggcgcgattctcagcctttctctgggtaagcactttccgattctcgacggtaacgtcaaacgcgtgctggcgcgctgctatgctgtaagcggctggcctgggaaaaaagaggtcgagaataaattatggagtttgagcgagcaggtgacgcccgcggttggcgtggaacggtttaatcaggcgatgatggatttgggtgcgatgatttgtacgcgcagcaaaccgaaatgtagcctctgtccgctacaaaacggatgtattgccgccgccaacaatagctgggcgctttatccgggcaaaaaaccgaaacagacgctgccggagcgcaccggctactttttgctattacagcacgaagatgaagtattgctggcgcagcgtccgccgagcggattgtggggcggtttatactgtttcccgcagtttgccgacgaagaaagtttgcggcagtggctggcgcaacggcagattgctgccgataacctgacgcaactgaccgcgtttcggcataccttcagccatttccacttagatattgtgcctatgtggcttcccgtgagcagtttcaccggctgcatggatgaaggcaatgcgctctggtataacttagcgcaaccgccgagtgttggcctagcggctcccgtggagcgtttgttacagcagttacgcactggcgcgccggtttaacgcgtgagtcgataaagaggatgatttatgagcagaacgattttttgtactttcctgcaacgtgaagcagaaggtcaggattttcagctgtaccccggcgagctgggaaaacgcatctataacgagatctccaaagaagcctgggcgcagtggcagcacaagcaaaccatgctgattaatgaaaagaaactcaacatgatgaatgccgagcaccgcaagctgcttgagcaggagatggtcaacttcctgttcgagggtaaagaggtgcatatcgagggctatacgccggaagataaaaaataaaaacagtgccggagcacgcctccggcaacttgcataaaaacaaacacaacacgcacccggaatgatgaaaaaatatctcgcgctggctttgattgcgccgttgctcatctcctgtagcacgaccaaaaaaggcgatacctataacgaagcctgggtcaaagataccaacggttttgatattctgatggggcaatttgcccacaatattgagaacatctggggcttcaaagaggtggtgatcgctggtcctaaggactacgtgaaatacaccgatcaatatcagacccgcagccacatcaacttcgatgacggtacgattactatcgaaaccatcgccgggacagaacctgccgcgcatttgcgccgggcaattatcaaaacgttattgatgggtgacgatccgagtagcgtcgatctctattccgacgttgatgatattacgattagcaaagaacctttcctttacggtcaggtggtggacaacaccgggcagccgattcgctgggaaggtcgcgcaagcaacttcgcggattatctgctgaaaaaccgtctgaagagccgcagcaacgggctgcgtatcatctacagcgtcaccattaacatggtgccgaaccaccttgataaacgtgcgcacaaatatctcggcatggtccgccaggcgagtcggaaatatggcgttgatgagagcctgattctggcaattatgcagaccgaatcttcctttaacccgtatgcggtcagccgttccgatgcgctgggattaatgcaggtggtacaacatactgccgggaaagatgtgttccgcagccaggggaaatccggcacgccgagccgcagtttcttgtttgatcctgccagcaatattgataccggcaccgcgtatctggcgatgctgaacaatgtttatctcggcggaattgataacccaacaagccggcgttatgccgtcatcaccgcctataacggcggcgcaggcagcgtgctgcgagtctttagcaatgataagattcaggctgccaatattattaacaccatgacgccgggcgatgtttatcagacgctgacgacccgccatccctctgcggaatctcgccgttatctttataaagtgaataccgcgcaaaaatcctaccgccgccgataattccattaaccgcccctgacgatgctcaggggcaaaaatgttatccacatcacaatttcgttttgcaaattgggaatgtttgcaattatttgccacaggtaacaaaaaaccagtccgcgaagttgatagaatcccatcatctcgcacggtcaaatgtgctttttcaaacactcatccgcatcacgatgtgaggaaattaacatgaatcttaagctgcagctgaaaatcctctcttttctgcagttctgtctgtggggaagttggctgacgaccctcggctcctatatgtttgttaccctgaagtttgacggtgcttctattggcgcagtttatagcagtctgggtatcgcagcggtctttatgcctgcgctgctggggattgtggccgacaaatggttaagtgcgaaatgggtatatgccatttgccacaccattggcgctatcacgctgttcatggcggcacaggtcacgacaccggaagcgatgttccttgtgatattgattaacagctttgcttatatgccaacgcttgggttaatcaacaccatctcttactatcgcctgcaaaatgccgggatggatatcgttactgacttcccgccaatccgtatctggggcaccatcggctttatcatggcaatgtgggtggtgagcctgtctggcttcgaattaagccacatgcagctgtatattggcgcagcactttccgccattctggttctgtttaccctgactctgccgcatattccggttgctaaacagcaagcgaatcagagctggacaaccctgctgggcctcgatgcattcgcgctgtttaaaaacaagcgtatggcaatcttctttatcttcagtatgctgctgggcgcggaactgcagattaccaacatgttcggtaataccttcctgcacagcttcgacaaagatccgatgtttgccagcagctttattgtgcagcatgcgagtatcatcatgagcattagccagatctctgaaaccctgttcattctgaccatcccgttcttcttaagccgctacggtattaagaacgtaatgatgatcagtattgtggcgtggatcctgcgttttgcgctgtttgcttacggcgacccgactccgttcggtactgtactgctggtactgagcatgatcgtttacggttgcgcattcgacttcttcaacatctctggtagcgtgtttgtcgaaaaagaagttagcccggcaattcgcgccagtgcacaagggatgttcctgatgatgactaacggcttcggctgtatcctcggcggcatcgtgagcggtaaagttgttgagatgtacacccaaaacggcattaccgactggcagaccgtatggttgattttcgctggttactccgtggttctggccttcgcgttcatggcgatgttcaaatataaacacgttcgtgtcccgacaggcacacagacggttagccactaattacgcaaagaaaaacgggtcgccagaaggtgacccgttttttttattcttacttcaacacataaccgtacaaccgtttcacgccatccgcatcggtttcgctataaacaccttgcagctccgggctaaatcccggcaacaaattcaccccttcttccagtgcaaggaaataacgttgaaccgccccaccccagacttccccgggtaccacgcaaagcacgccaggtggataaggcaacgccccttctgccgcaattcgcccttcggcatcacgaatccgcaccaactccacgtcaccgcgaatataagcgctatgcgcatcctgggggttcatcaccacactcgggaaactctgctggcggaacatcgctttttgtaggtctttgacgtcgaaactgacatacagatcgtgcatctcctgacacaactggcgcagggtgtagtcgcgatagcgcaccggatacttgttataaacgctcggcaacacctcaaccagcgggctgtcatcctcaatatgctgttcaaattgcgccagcatcgccaccagttgtgccagcttctcgtggctttccgccggagttaataaaaacagaatggagttgagatcgcacttctccggcacaatgccgttctcacgcagatagtgcgccagaatcgtcgccggaacgccaaagtcgctatattcgccggtttcggcatcgatacctggtgtagtgagtaacagcttgcacggatcaacaaaatactgatccgcggcatatccttcaaagccgtgccacttcgcccccggctcaaaactgaaaaaacggcggtcgctggctaacacacttgtcggataatcctgccacaatttgccatcaacaacgggcgggataaacgggcggaacagcttacagcgcgcaagaatagccttgcgcgcttcaatccctatctcaacacactcagcccacagccgacgcccactctccccttcatgaattttggcgttaacatccagtgcagcaaacagcggatagaaagggctggtagaagcatggagcataaaggcgttattcaaccgcttatgcgggcaaaaacgcgcctgtccgcggatatggttatcttttttatggatctggctcgtctgactgaatcccgcctgctgtttgtgcacgctctgagtcacaaagatccccggatcgttttcgttaagttctaacagcagcgggctgctatccgccatcatcgggataaattgttcataaccgacccacgcggaatcaaacagaatgtaatcacacagatgcccaacggtatcgatcacctgacgggcgttatagacagtgccgtcataggttcccagctgaataatcgccaggcgatacgggcgcggcaggtcggctttttctggcgcaacgtcgcgaatttgctggcgcagatactcttcattaaaacagtgcgcatcaataccgccaatgaaaccaaacgggttgcgactagcttccagatagaccggcgtcgcccccgcctgaatcagcgcgccgtgatgattgctcttatggttgttacggtcgaagagcaccagatcgccacgcgttaacagcgcattcgtcaccactttattcgctgcgcttgtgccgttcagcacaaaataggttttatcggcatgaaagactttggctgcgaatttctgcgcatctttcgcgcttccttcatgaataagcagatcgcccaattttacgtcagcgttacacatatcggcgcgaaagacgttctcaccaaagaaatcgtaaaaatggcgtccggcaggatgctttttaaaaaacgcaccatgttgatgtccagggcaagcaaaggtgctgttgcccatctcaacgtactgcgtcagcgtgtcataaaacggtggcagcaaattctcttcatactgacaggctgcggattccagctccagccactgctgctcgttgccgttgattaccgccgtaacgcccgcaggtaattcaacagcatgttcggaatacaaaaacaccggtagatgaaaaccggtgcgcttaagcaacgcaagaatgccactgcgactatccgcagcggtaatgacgactgccgcgacgtccgtaaaatcagtatctcccaacgccaccacgcgacgatgagaagaaagtcgggataccagttcactactggcggcaatattcatacttttcataagcgcaaacccgtttcggggaagtaagaataccggacaaggtggaaaaccctgccccatgagatatgggtcaaactggtcaccagctccgaccgccagacatcagtaaaagcagaaacgctctgattttactgttgtcctgcagtgagcgtgcgttaacttcaccgcatgagcagtaacatagaaagggaaacgtttcgcgcgaaacggcgataagcgagagaatgtaaggagatggcgtgcatcgggcaaactccgtacagagaggagaaaattcgcgcaatcatggcacctttcgctaaagcgtgcaagccaggactttgcgaacaaacaagccatcgacggcaccaaacggtcataataagaaaatcaaacaatacagctaacaggaactcttgtggtcatcggcccttttatcaacgctagtgcagtcttactgggtggcgttctcggcgcactgctcagccaacgcttaccggaacgtatccgcgtctccatgacaagtatttttggtctggcaagcctggggattggtattttactggtggtgaaatgtgccaaccttccagcgatggttttagctacgctacttggcgctctaattggcgaaatttgtttgctggagaaaggtgtcaatacagcagtcgccaaagcacaaaatctgtttcgtcacagtcgtaagaagccagcgcatgaatcttttattcagaattatgtcgcgattattgtcctgttttgcgccagcggcaccgggatcttcggggcgatgaacgaagggatgaccggcgatccgagtattttaatcgccaagagttttcttgatttctttacggcgatgatcttcgcctgcagcctgggtattgcggtaagcgtgattagtatcccattactgatcatccagttaacgctggcgtgggctgccgcgctgattttaccgctgaccacaccgagcatgatggcagacttcagcgccgtaggcggtttattgctgctggcaaccggattacgcatctgtggcattaaaatgttcccggtggtcaacatgcttccagcactccttctggcaatgccgctttccgccgcctggaccgcctggtttgcctgacaatgcgtgcaatatcggcaaagtgatgatagattgtgcagtctgcagtaaattgaagaaatttgattgacgagacgaggcgaatcaggtttaatgcgccccgttgcccggatagctcagtcggtagagcaggggattgaaaatccccgtgtccttggttcgattccgagtccgggcaccactaattcttaagaacccgcccacaaggcgggtttttgcttttggatctgacaataaccttcacgaaaaaaattagcttataaagtctgggggaattactctcgccacgttaacgagagtaattttattgatattaatctcctgatactttacccccgtccaaactccagccgctgcacattcaccatcccaggcttctcagcagcactgacatcaatttgtgtcacccgcagcgcatagaacgccattttgaatttacgaacggacgcattatcagtgactttaacggcatgggcaaagtgaaatatcattttttaacgataaaaagagtgttatttcttgtgtatcagacaataagcattcattcaaaacctttagaaataatcaaaacacaggtattccactggttaatatattcacatatgaaatgaataaatattggaatatataaatattgaatattttgattaatccccgtactgattattcttcataatcagtacggggttgctacaacatgtattactttttcaccacaattaacggttcaatatcactctcttttttgatgaccagactttcatcaccgcgcaaacacgtcccaccgtagttgccgccaacggtgaaggtacatacctgaatgtatttaccgtccactttcggcaaacaccacagttgctgatagatgtttttctgctcggcaaatttaccgctggttttgtccagcacctcttcatgatggctgacgaggtcgatattgctgccacagcgaccggcgatcggtttcactgcgtaacctgttttcaccagttcatcattaacagtgaaatcggtatccagcaggtaacgatggtgcgggaacaggctccagaggatcggcagaatcgctttgttgccggggatcaccgtccacagcggctcaaagaccagcacttccgggcgcagcaatacgtcgataagacgcacttcgttttgcggatgaccggtacggattggcaccgcagcaaactcacggtcgctaacttcacgaatctgatcaaacgcggtttcccacgcccaggttttccacacgcagttaaccagtcgcccttccccatcaatcagttgcccggcagcatcccagcccagttcatccaatccacgcaagatacgcgtttcaaagcccgcctggtgcagcgcctgctccataaactgcgcgtgatagttttcctcgatatctttgtcctgcatgatatggacaaacggacgtgcacgactgtgtttccaggcaccagccaattcgttaatcagcccttccgccggattgaagccgttgcctttatagccctgctccgcccaacgttcgaggatcaagcccgcttcggtatgacaggaggcggagtcggcgttgtactcgtaaaccttcaggccacgctcatccatgcagaaatccatacgaccagtgatcatatggtgacggcgacgctgccaggagagacgcaaacgtggccagaggattttcgggatgtcgaacagcgccagcaggttgtcatctttcagcaccttgtcggttgcgtgaagatacatcaggtgcagctcgttggtggctttaattagctcctgctcggcactctcggtaatggtgtagtaatgataaggatcctgattgatcacctgaccgttggcctgcacataggcgttttgcagcggatctttttcatccagccatttaccgtcaaactggcctttgttttccaggcgcgctccgctgattttcagcagctcgcctgcaatttccggctgcggtaagctgtattcagtatcttccgtctggatcatccagcccagaatggtggtgtcatcaaaagtgtctttcagggtatagcagccgttttcgaccaccatctccagctcgcgcgtccactgttgcccttgcggcaacggggaatgaatcacgttctgttccgcaatacggactttgttgccatgcaattgggtaatgatggcgacatggccagtgtctttaaattcaccgcctttatcccagataagaagcgcacccgcgaccggcgcacgcgggctgccgttaggaaatgcctgcaatggcaggatgttgtcattaaccacttctcgcaggaagcgcaggctgaaaatctcccacgccatacccacgtcagtaaagaccacaccgtaattcagaaagagaaaacggcgagcaaattcaacgcattgccacttgtggcccatatattcgtcgtcgatatagctacggaatacggcgtcatcttcgtattcctgcggatcgagagaactgtaatcactagagtagattgctaccccacctggggcgtagcccaataatgtcccgaacggggcatcctggctggtcgttcctttgctcatcactttacctttaacaatacaacctaagcagttggcgtaattgttgtgctctgattacctgctcagcgacattaaccggacagaggtcagactaatcatacacctcatcgcagcggctggcgcaaagggttaaaaaattcacattctgtacagcaagtgacctgctacactgcttcaacactaccactcagaaggcaactcactatgacagacaatacttatcagcccgcgaaagtctggacgtgggataaatccgctggcggcgcgttcgccaatatcaatcgcccggtttctggtccgacgcatgaaaaaacgctgcccgttggcaaacacccattgcaactttatagcctgggaacgccgaacggtcagaaagtaacgattatgcttgaggagctgctggcgctgggcgttactggtgcagagtacgacgcctggctgattcgtattggcgatggcgatcaattctccagcggctttgtcgaagtgaacccaaacagcaagatcccggcgctgcgcgatcatacgcataatccgccgatccgcgtgtttgaatctggtagcatcctgctttatctggcggagaaatttggctacttcctgccgcaggatttggcaaagcgtactgaaacgatgaactggctgttctggttacagggcgcggcaccgttcctcggcggtggttttggtcacttttaccattacgcaccggtaaagattgagtacgccatcaaccgctttaccatggaagccaaacgtctgctcgacgtgctggataagcaactggcgcagcataagtttgttgcgggcgatgagtacaccattgcggatatggcgatttggccgtggtttggcaacgtggtgttaggtggtgtgtatgatgccgctgagtttcttgatgcgggcagttataagcatgtacaacgctgggcgaaagaagtaggcgaacgtccggcggtgaaacgtgggcgtattgttaaccgcaccaacggaccgctgaatgagcagttgcatgagcgccatgacgccagtgatttcgagacgaatacggaagataagcgtcaggggtaagggttggtgttcgtcgcagcaagccatccaggccggataaggcgttcacgccgcatccggcaatcgtgcacaatgcctgatgcgacgctgccgcgtcttatcaggcctacgaaagctaatcatcacgcgctggtaatgtcgtaatccatttggcgcagtgcgtctaatgtggctttggcttcatcttcgtcgatgatgctcatggcaaatccgacgtgtaccagcacccactggcccagtagatcggcagggttaccttcacaaatcagggcgatattcacatcgcgcttgataccacatacttcaacctgcgcaagctggtgaatatcttcaccgacagccagcacctggcctggaacgccaatacacattattaactccggttattcaacttcaatacttttgacgatcaggctatcgccggtatcgacacgcaaccgctcgccgtgacagagcggacactgcgcatcgtgctgatgaatctccaccacctggctgcaatcccagcaccaagcctgggcgggtttatagacgatatgtaaatcgcacccttgcgccaccgttccgtggcagacaatttcaaaactaaaacggacggcgctctcctcaacgcaggagagcgcgccaatttccagccacacggcggtgacgcgcttaacatcgtgctgctccgcctgccgttggataatttcaacggcgctctggcaaagagacaactcatgcattttcgccactcctgcgaccaaacagcagggcgcgacgccctgcgtgtggtacatccggattcgtgactggcaggctaaggatcattcgtgcgcagtcatccgtcaggcgttggccctcttcaatgctcatgctgtggctaagcgggctcatcaggctacaggagagatattggctaacaccgtccagttcgccaacggtaaaggtcatagtgccatacggcagttgcagaccaattttttcactcactttgcgcagcggccagagttgatccgggccggggaagataactgcactcagcatccacggggtgatcacacaccccgtccactgaccttcgaacagcgtaaaatcagaaacatacaccggcatactaggatgcagaaaagagagatcgtgcatgctacgccgggcaatttcttcaaacactgcctgtacttgcgccttcggggaggtctggaaacctgctatctcttcagtcatgaatcgcctcccgtgggatggcttccacgccagattcacgcagcgcagccagaacctgctcaagcgcaggttcaatcattgcttcaaccgtcggcgttaagccgatgtgtggctccaggctttccgggatcacgccgaccagggtcagctttttcggaaactcgccggtgaagcgcagggcgctcaagacgtcggccaggccaagctgatgcggagagattttgttggtaaacaacgccggaacttcttcatcccgcaggatcatcatcgttcccggcgcgttctttttgctgacaatggcatccgcaataatcaaatgatcgcgatttgccatgtcgccaagcagctccattcccgccgtgccgccatcgaggatctcaacataatccggcagaatgtatcgttgctctaacgcttcgacaatccgcacaccgatggcttcatcggtcagcaaaatattgccgacccctaagactaaaatacgcattacagaaccttcacactaaccacttcgttgccgtcagcatccactacgtgtaccgcacaggccatgcacgggtcaaaggagtgaatggtacgcaccacttccagcggtttattcggatcggcaaccggtgtacccaccaggctctgctcgtaaggaccgacgtcatcattgaagttacgcggaccagagttccaggtacttggaacaaccgcctggtagttgctgatgataccgtctttaataaccatccagtgagagagcataccgcgcggcgcttcgaggaagccaacacctttgaattcacccgttgccggaatgttcggcttcacaaaggtggtgtgatcgcctttgccgatattggtgatcagtgcactgtattggttttgcaggatatcctgcaattcacagcagtgaacggtacgaccaataatacggcccagcgtggagtgcagctgtgccacttccagcgtgttgccagtcagtttctgataaatcgcaacgatttcattcagtttgttctgggtagattcgcgacctgccgccagtttcaccagcatattagccagtggccccacttctaccgttttgccgtagaaagtcggacttttcacccaggaatatttcccgtcgtcagaccaaccatcataagccggaatggtggtgccttcccacggtgcctgcggcgcttcgtctttataccaggagtgcttcgcgctttcctgaatgcctttgatcaggtattcatcggaatgagaagtgatcggacgatagctggacagatccgcattctcaatgtagccgcccgggaacaggaagctgccgtttttactgtcggtcgggaattccggcacgctcaggtagttcaccgcacctttaccgcgtgtcagccattccgggtagaacgcggcaataactgcggtatcaaccttataaacctgctcaacaaagtcgctcagtttgtcgatgaaagacttgatgtacatcaggcgctcaaggttcagcacgcccaaaccgtcgaggttgatcgggttcgcgacaccacctaccgccaggttctgaatgtgcggcgttttaccgcccagcagcgccacgacgcggttagcgtcacgctggcactccaacgcttgcaggtagtgcgctaccgcaatcaggttcacttccggcggcagtttcatcgccggatgaccccagtagccattagcgaaaatacccaactgaccgctggcaaccagatctttgatcttgttctgaactttggtgaactcttccggactgttcaggtgccaggtgctaacgcctttcagcatttcggaggctttggttgggtcagcttgcagtgcagaagtgatgtccacccagtccagcgcgctaagctgatagaaatgaacaatatggtcatgcgtggtgtgcgcagccagaatgatgttacggatgtattgcgcgttaaccggaacgtcgatattcagcgcactttctgccgcacgaacggaagacagcgcgtgagtggtagtacatacgccacagatacgttgcacaatcatccatgcatcgcgcggatcgcggtttttcacgatctcttccatgccgcgccacatggtaccggaagcccatgctttgctaacgacgccattttcgatttcgcaatcgatgcgtaaatgcccctcaatacgggttaccggatcaatagtaattctctggctcatgctttgctcgcctcatgacgattatgatcgttttgttttaaaggaggaagtatcggcagtagacgaatgagtacgatgtaagcgcaaatctcaatagccacaaaaccaatagaaatcaacagttcttcccaggtcgggaagtaggcgtaaccgccgcccgggttgaatgccaccaggctataggtcagacgccaggttgcacaacctaacagtgcgctcagtgcactcaggaacagcatgcgggaatcattacgcagcttcgccacacgcagaacgaccagcgggaagagcatcagcaggacttcaatccagaacatcacggagtagaagtcaccggcaaacgctaagctcagcttgtcgcgatagataagctcgccaaagcgcagcacgatgaaaatcgccagcaacacactgatggtgttggtcagcttaacaaacagactcttttcatccggaccgttgccacgcagacccgcctgcaccaggctaccttcaaagatgacaatgctgaagcccatgatgaacgccgtcagcaggctgaacagcggcaacatttcatagctctgccacaacggatgcaccttgtagcccgcgctgatcatcaggctccccatactagactggtgcatggtcggcagcagcgcaccgagcgcgatgatgaagaacatcaccttgtttagtcgctgtaggctcaccttccaccccagacgttcaaacagtgccggagcaaactccagtgccatcacgccgatatagatggtcatacagaccgccgtctcgaacagtacgctgttcacgttgaagtgacccggaatgtagaagtacggcaggttccagtagcgacccacgtcgatagtgatgctcaagccacccagactgtaaccaaacagactcgccaacagcgccggacgcaccagcggatggtattgcccacggttaaagacgtataccgcccacgccagcgcccagccgccacaggcaaagccggtgccaatcagcaggtcaaacgcgatccacacgccccacgggaagccgccgttcaggtcagagacagagcccagaccgaacaccagacgcttcacaatcaggagcatacagatgacgattaacggtccaaaaatcatgaccggtttactgatgattttgccgcccagcggttgtggatcatgactcatgatcgtctcctccgtcgtgattattcaactctcatgatcgtctcctccgtcgtgatggtcgtttttggtgttgcgacgaaccagcacggttaagcccgccagcacagccagtggtagcatcatgcctttatacagggtgtgttgaatattttcggaacgcgcaccggtagaaagatcgtccagtttcggcaggtcgagattttcataaggcacacccgtcagtaccagaacctgagtaccgccgccctctttctcgccgtacagatgcggataatatttcggcaccgtatgcaggtaagtgtcgccagatttcagcgtctgacgcggatagtggtattcgctgccaggcttcagcgccagacgttttttcgcctccgccatcagctcttcacgcgtaccgaaaatcaccgcgcccgccgggcacacttctacgcagccaggtagaccgcctttatcgagacgttccacacctttctggttgcacagctcgcacttatgcagcgcaccaaacgggttgttgtagtcgtacttcggcacgttgtacggacaggcgaccatgcagtaacggcagccggtgcacacatctttgtcgtaatggacaatgccggttttcggatcttttttcagtgcagagaccgggcacacagagacacagttcggatcgacgcagtgcatacactgtttcttaatgtacgcgtagccgttctcctcctggtctttgttgacccctgtgccgctggtccacacctgaatgatgttattggtatacgggctcagtttgtcgttgttgctccaggtctgttccccttgcgggttacgttcagggaaattgatatcctgacacttggtgacgcaagcctggcagcctacgcacaaggtgctgtcgtacaacatccccaggcttcccggaattggcgggcggttttcagcagccgcatgactgacagacggcagcgcgcccgtcagcaatgccccgcaggaggctgctttaataaaattacgtctgttcacggttattctccccgactgtcagcgttatctttcttttgctgacgacccagttcacgcaccgccatcacgctgacaccggcaaccaacccaaccacaccgccgagcaaaccaatagcgcctgcagagacgttgccgccctctttagcgttaacatccggtttctgactacgcggagtttgattttcgacgttggcaagctgatggatgcctttatggaagccgataccttcttcgttacagccatagcaagggtgaccaatcgccaccggccacacaccgccaacatcgcagaattgcagcgtactgcagttgccgtaagtttctggccctttacagccgaggtggtacaggcaccagccttcgcggtggccttcatcaccgaactctttggcaaaacgaccagcatcgaagtgcgggcgacgttcgcagtgttcgtgaatcagacggccataggcgaaggtcggacggtttttgtcatccagtttcggcggtttgccgtaagtgatgatgtgcgcaacggtcgcgaggaagttgtgcgggttcggcgggcagcccggaatattgataacggttttgcctggcagaacttcttgcaggctgactgcgccagttgggttaactccagctgcggcaacaccgccccacgcagagcaggaaccgatagcgataatggctgctgcgccttccgccgctttgcggatgtgatccacaatcggctcaccggcaaccatgcaataaataccgttatcttttaatgggatggaaccatccaccactaacacatactgccctttgtacttctcgagagcgttatgtttgttctcttcgacctgatgaccgaaggcggcggaaagcacttcgtgatactccagagagatagtctccagtacgaggttttctaccgttggatgcgttgcacgaagcagagattccgtacaaccggtgcactcctgcgcgccaatccagataactggcggacgctgcgggttagtaacgctttcggccatctctgcagcggctttgctacttaaccccatggtggcggctaatgctgcacaaagcttcatgaaatcacgacggttaatgccgtgagaatggatgagggtgttatctccagtcatttatagttattccgttgcgaagacctggcatatattttgcctcaatcgcaaaatcaataatgcgatcgatgcgccatttaccacacatttattatggttatcgatatcatgatactgcggcggggcgctaaaacgaagggaagaagcattagtgtaattaattaaagcaagataatacgtatgtttgatcaattttcgaggcgataaccggccataaaaaagcgcaacgtagaacaggaattattctcacgaaagaaatccattaccatctctttatccagtccatagcggcgcgtcagaatacccgcttcccaggcgctaagctggcgatctccggtcttttcgtacatccggtgactgtagcctaatacaaaaccgcgtttataatcggcacagaattttgtcacattaaccgcactgtcggcatgcgttgcttttaatcccgccattaagcctttaccaaaatggttattcatcgttcacctcattcgctatatattgtcatatatagcgatattttaggcaaagaacgacttttgcgcacgctattttttcatgcttgtttaagacgtaatcccgtaagagataaacctatcaggagagatatttatcgaaccatttcagtgtcctttgccaggcaagatcggcggcagatttgtcataacggggcgtggaatcattatggaatccgtgattaacccccggatagatatacgcctcataaaccttattattggctttcaacgccgcctcgtaagcaggccagccctcgttgattcgggtgtccagttccgcgaagtggagtagtaaaggcgcttcaatcttcgccacatcggcagtgggtgcctgacgaccataaaacggcaccgcgcaggccagttccggatacgcgacagccgccgcgttgcttacgccaccgccatagcaaaatccggtaatacccactttgcctgtcgcttgcggatagcgttgcataaactcaattgcggcaaagaaatcattcatcagtttgttggatcaacctgctgttgcagctcacgacctttatcatcatttcccggataacctccaacggaacttaagccgtcaggtgccagggcgatataccccgccttcgccactcgccgtgccacatcttcgatatacggattcagtccacgattctcatgcaccaccactacggctggcgttttgccgctcatctttgcgggcttcaccagataaccccgcacctcgccgtgaccatttgggctaggatacgtgatgtactcagcaacaatttccgggtcggtaaactctacctgagtcgccagcgcataatttggcttgagcaaatcaaacaacgctaatgccgtcatcccgcctaccgcacttcgccgcaaggttgaggaactcacgtttcgagattttcccgtgagcgtaatagtcatagtaatccagcaactcttgtgggaaatctttggcggttaaacgcggcatcgttgcactcctcagttggtgtttttttaagcaaagcataagcacgtatttttgcccagtttttcgtcactctgtgagccagactacgggatacgcgctggcgaatcgctaaactagaaacattgtttcgaaattgaacggtggaaaggagaggtcatggtctggttagcgaatcccgaacgttacgggcagatgcaataccgctattgcggaaaaagtggtttacgcctgcccgcgttaagcctcggtttatggcacaatttcggtcacgttaacgcgctggaaagtcagcgtgcgatcctgcgtaaagcgtttgatttgggcattacgcactttgatttagccaacaattacgggccgcctccaggaagcgcagaagagaactttggtcgcctgctgcgggaggattttgccgcttatcgcgatgaactgattatctctaccaaggctggctacgatatgtggcccggcccttacggctctggcggtagtcgtaaatacctgctcgccagcctcgaccaaagcctgaagcgtatggggcttgagtatgtcgatatcttttactctcatcgcgtcgatgaaaatacgccgatggaagaaaccgcctctgcgctggctcatgcggtacaaagcggtaaggcgctgtatgtcgggatctcctcttacagcccagagcggacgcaaaaaatggtcgagttgctgcgcgagtggaaaattccgctgttaattcatcaacctagctacaatttactgaaccgctgggtggataaaagcggcctgctggataccctgcaaaataacggcgtgggctgtattgcctttactcctctggctcagggattgctgaccggaaaatatctcaacggcattccgcaagatagtcggatgcatcgtgaagggaataaagttcgtggtctgacaccgaaaatgcttaccgaagccaacctcaacagcctgcgcttattgaatgaaatggcacagcagcgtggacaaagtatggcgcaaatggcgttaagctggttgctgaaagatgatcgcgtgacgagcgtattgattggtgccagccgcgcggagcaactagaggagaacgtgcaggcgctgaataatctgacatttagcaccaaggagctggcgcagattgatcagcatatcgccgatggcgagctgaatctgtggcaggcgtcttccgataaatgacctgttaataacgggcgcgcgaaccgcgcccgaatcagatcagtgattatgacgagtcagtcggtcaagatagcccatcacaaatgcagaaagcacaaacgtcagatggataatgacgtaccacatcagtttgttatccgggacatttttcgcatccataaagacgcgcagtaagtgaatggaagaaattgccacaatgctcgctgctactttgtttttcaggctcgttgcgtccattttccccagccagttcagcttctctttgttctcggagatatccagctgactgacgaaattctcataaccggaaaacatcaccatcaccagcaaaccgccaaccagcgtcatatccaccaggctcagcaacacgaggatcaaatcactttccgccatgctgaagatattcggcagtacgtgaataatctcctggaagaacttcagcgccagggcaactaacgccaggctaaggccaaagtacacgggggcaagcagccagcgagaagcatacattgcattttcaagaaaacgttccatacattcctgtcgtgtagttaaaacgggcaacagtatatcgcaattgagtaaacagcacgcaacagcaaatcaacatatacgttaaacctttgtcgcataattctgaggtttagggatcttcctggttcccttatcaacgcatcgagaacgtctacccttaaaggacgttgaacctgaagggagaaaaacgatgtctcatttaaaagacccgaccacgcagtattacactggtgaatatcccaaacagaaacaaccgacgccaggcatccaggcgaagatgacaccggtaccggattgcggcgagaaaacctatgttggtagcggtcgcctgaaagatcgtaaagcactggtgacagggggcgattccggaataggtcgcgctgccgccatcgcttacgcgcgtgaaggggctgacgtggcgatcagttatcttcccgtggaagaagaagacgctcaggatgtgaaaaagatcattgaagaatgcggacgcaaagccgttctgctgccaggcgatttaagcgatgagaaatttgcccgtagcctggttcacgaagcgcacaaggcgttaggcgggctggatattatggcgctggtcgccgggaaacaggttgccattccggatattgcagacctcaccagcgaacagtttcaaaagacctttgccattaacgttttcgcgctgttctggctaacccaggaagcgatccccctgctaccgaaaggtgcaagtatcatcaccactagcagtatccaggcataccagccaagtccgcatttactggactatgcggctacgaaggcggcgattctgaactacagccgtggcttggcaaaacaggtcgcggagaaaggtattcgggtgaatattgtcgcgccaggcccgatctggacagcactgcaaatttccggcggacaaacgcaggataagatcccgcagtttggtcagcaaacgccgatgaaacgtgcggggcaaccggcggaactggcccctgtatatgtttatctggcaagtcaggagagcagctacgtcaccgcagaagtgcacggcgtgtgcggcggcgagcatttaggttaaaaaaatgcccggttgtgaaaagcaaccgggcatcattgtgaattcactcttacctgatgtggcgaaaacgccttatccgcctacaaacgcatgaagattcaacatgttgcaatagattttgtaggcctgataagcgtagcgcatcaggcattgagcacctaatgccggatgcgtcgtgaacgccttatccggcctacaaacgcacgaagattcaacatgttgcaatagattttgtaggcctgatgagcgtagcgcatcaggcaattctactttacttcgctttggcggtttcttcgccgaccagacctatcttcaggtaacccgcctgatgcagcgtatccattaccttcatcaacgtctcgtaatcgacggttttgtccgctcggaagaagatggtggtgtctttcttgccttcggttaacgcattcaacgccgtaatcattgtttcatcggtgaccggatcgttaccgataaacatgctgttgtctgccttcacgctcagataaaccggtttttccgggcgcggctgcggcgtgctggtagaagcaggcaagttcaccttcacatctaccgtcgctaacggtgccgccaccataaagataatcagcagaaccaacatcacgtcgataaacggcgtcacgttgatatcatgcatttcgccgttatcgtcgaggttttcgttaagatgcattgccatcggatattatcctgcgcgtaatttttgtgcgacacgaaccggatgcgcagcggcgctggcttccagatccaggtcacggctttgcagcaacaatacctgcgctgcaacatcacccagcatcgctttaaagccgccaatctggcgtgcaaatacgttatagataacgaccgcaggaatcgctgccacgaggccgattgccgttgctaacagagcttctgcgatacccggcgcaacgactgccaggttagtggtctgcgtttgcgcgataccaataaagctgttcatgatgccccagaccgtaccaaacagaccaacgaacggagaaatcgcgccgatggttgccagatagccgttaccgcggcccatttgacgacccactgcggcgacccgacgctccagacggaagctggtacgttctttaataccttcgttatcgtcgctgccttcactcagttccagctcattctgcgcttcattgagcaaatgcaggcttaagcttttgctaccaaaatcagcggcgatatcgttggcctggtttaaggaacgcgcttcagccagcagttgctgctcgcgcttaaggcgacgcttctgattgaagaactctacgctcttactgaagaagattgcccaggtgactacggaggccaaaataagcccaatcatcacgcacttaacgacaatatcggcgtgctgatacataccccagacggaaaggtccgtctgcattaaattattacccactgtgtatctccaggacgcaagtcacaaaatctgcgcataataatatcaaaacgacgtcgaattgatagtcgttctcattactatttgcatactgccgtacctttgctttcttttccttgcgtttacgcagtaaaaaagtcaccagcacgccatttgcgaaaattttctgctttatgccaattcttcaggatgcgcccgcgaatattcatgctagtttagacatccagacgtataaaaacaggaatcccgacatggcggacaaaaagcttgatactcaactggtgaatgcaggacgcagcaaaaaatacactctcggcgcggtaaatagcgtgattcagcgcgcttctagcctggtctttgacagtgtagaagccaaaaaacacgcgacacgtaatcgcgccaatggagagttgttctatggacggcgcggaacgttaacccatttctccttacaacaagcgatgtgtgaactggaaggtggcgcaggctgcgtgctatttccctgcggggcggcagcggttgctaattccattcttgcttttatcgaacagggcgatcatgtgttgatgaccaacaccgcctatgaaccgagtcaggatttctgtagcaaaatcctcagcaaactgggcgtaacgacaagttggtttgatccgctgattggtgccgatatcgttaagcatctgcagccaaacactaaaatcgtgtttctggaaagcccaggctccatcaccatggaagtccacgacgttccggcgattgttgccgccgtacgcagtgtggtgccggatgccatcattatgatcgacaacacctgggcagccggtgtgctgtttaaggcgctggattttggcatcgatgtttctattcaagccgccaccaaatatctggttgggcatagtgatgcgatgattggcactgccgtgtgcaatgcccgttgctgggagcagctacgggaaaatgcctatctgatgggccagatggtcgatgccgataccgcctatataaccagccgtggcctgcgcacattaggtgtgcgtttgcgtcaacatcatgaaagcagtctgaaagtggctgaatggctggcagaacatccgcaagttgcgcgagttaaccaccctgctctgcctggcagtaaaggtcacgaattctggaaacgagactttacaggcagcagcgggctattttcctttgtgcttaagaaaaaactcaataatgaagagctggcgaactatctggataacttcagtttattcagcatggcctacagctggggcgggtatgaaagcttgatcctggcaaatcaaccagaacatatcgccgccattcgcccacaaggcgagatcgattttagcgggaccttgattcgcctgcatattggtctggaagatgtcgacgatctgattgccgatctggacgccggttttgcgcgaattgtataacattgccacttttggacaattttgcagacattttattgtgaaaagtcttaaattgttgcgtccgggatcaaggcgtcccggacgattcaggagtacaataggcagataaaggcttaaacgctgttccacaggaaagtccatggctgttattcaagatatcatcgctgcgctctggcaacacgactttgccgcgctggcggatcctcatattgttagcgttgtttactttgtcatgtttgccacgctgtttttagaaaacggcctgctgcccgccagttttttgccaggcgacagcttgttgatactggcaggcgcattgattgcccagggggttatggattttctgcctacgattgcgattctgaccgccgcagcaagtctgggctgctggctaagttatattcaggggcgctggttagggaataccaaaacggtgaaaggctggctggcacagcttcctgctaaatatcaccagcgcgccacctgcatgtttgaccgccacggtctgctggcgctgctggctggacgttttcttgcatttgtccgtacgctgctgccaaccatggcgggaatttccggtctgccaaaccgccgcttccagtttttcaactggttaagtggattgctgtgggtcagcgtggtaaccagttttggctatgccttaagtatgattccgttcgttaaacgccatgaagatcaggtaatgacgttcctgatgatcctgccaattgccttgttaaccgctggcttgttaggcacgctgtttgtggtgattaaaaaaaaatactgtaacgcctgacgattttccccgttcccggttgctgtaccgggaacgtatttaattcccctgcatcgcccgcattcttgccgcatcttcccccggcgtcacaccgaagtaacgtttaaactcacggctaaattggcttgcgctttcatagccgacgcgcatcgctgctgcgctggccttcatgccgtcatggatgatcatcatccgcgccttatgcagacggtaattcttcaaatactgcaacgggctggtactggtgacagacttaaaattatggtggaacgcgcttacgctcatgttggcttctgccgccagttgctcgacgctcaggttttcggtgtatttattctcaatccgtttcagcacgcggctaatcagactgaagtgagtctggcgactgaccagcgccagtaacgcgccgccgcaaggtccggtcagcacgtagtacagaatttcgcggatgatctgtttgccgagaatacgcgcatccagtggtcgctccatcacgtcgagtaaccgctccgccgcgcataaaatctcttcacttaacgtggcggagttaatcccgctggctgccatgctcggctggaaatgctcatcttcgccaatgtccatcaacagttcctgtaactgcaaaatatcgacattgagacgcaaccctgccagcggcacctcactcgtggcataggtttcgcactcaaacggcaacggcaccgtcagcagcaggtattcattggcatcataacgaaacacgcgttcattgatataaccgattttatgcccggaaaagagaattatgatgccaggctcgtacatcaccggtgtacgtgcgaaaggcgtctcgccatacaacaaacgcacatcgggcaacagtccactcaaactattttctttatttttcagtttattaactttatccgccagcaagcggcaaatctcttcacgtttcatatcgcgtaatttcttaggaataatgcggcaattactttgtgcgcaattttgtagcatttctccagcactctggagaaataggcaagacattggcagaaatgagcattgagagccagggcgctggcgatcacaatgaaaaacatcaggcagatcgttctctgccctcatattggcccagcaaagggagcaagtaatgaacaactttaatctgcacaccccaacccgcattctgtttggtaaaggcgcaatcgctggtttacgcgaacaaattcctcacgatgctcgcgtattgattacctacggcggcggcagcgtgaaaaaaaccggcgttctcgatcaagttctggatgccctgaaaggcatggacgtgctggaatttggcggtattgagccaaacccggcttatgaaacgctgatgaacgccgtgaaactggttcgcgaacagaaagtgactttcctgctggcggttggcggcggttctgtactggacggcaccaaatttatcgccgcagcggctaactatccggaaaatatcgatccgtggcacattctgcaaacgggcggtaaagagattaaaagcgccatcccgatgggctgtgtgctgacgctgccagcaaccggtagtgaatccaacgcaggcgcggtgatctcccgtaaaaccacaggcgacaagcaggcgttccattctgcccatgttcagccggtatttgccgtgctcgatccggtttatacctacaccctgccgccgcgtcaggtggctaacggcgtagtggacgcctttgtacacaccgtggaacagtatgttaccaaaccggttgatgccaaaattcaggaccgtttcgcagaaggcattttgctgacgctaatcgaagatggtccgaaagccctgaaagagccagaaaactacgatgtgcgcgccaacgtcatgtgggcggcgactcaggcgctgaacggtttgattggcgctggcgtaccgcaggactgggcaacgcatatgctgggccacgaactgactgcgatgcacggtctggatcacgcgcaaacactggctatcgtcctgcctgcactgtggaatgaaaaacgcgataccaagcgcgctaagctgctgcaatatgctgaacgcgtctggaacatcactgaaggttccgatgatgagcgtattgacgccgcgattgccgcaacccgcaatttctttgagcaattaggcgtgccgacccacctctccgactacggtctggacggcagctccatcccggctttgctgaaaaaactggaagagcacggcatgacccaactgggcgaaaatcatgacattacgttggatgtcagccgccgtatatacgaagccgcccgctaagctttttacgcctcaaactttcgttttcgggcatttcgtccagacttaagttcacaacacctcaccggagcctgctccggtgagttcatataaaggaggaacgtatggctaatccaaccgttattaagctacaggatggcaatgtcatgccccagctgggactgggcgtctggcaagcaagtaatgaggaagtaatcaccgccattcaaaaagcgttagaagtgggttatcgcagcattgataccgccgcggcctacaagaacgaagaaggtgtcggcaaagccctgaaaaatgccagtgtcaacagagaagaactgttcatcaccactaagctgtggaacgacgaccacaagcgcccccgcgaagccctgctcgacagcctgaaaaaactccagcttgattatatcgacctctacttaatgcactggcccgttcccgctatcgaccattatgtcgaagcatggaaaggcatgatcgaattgcaaaaagagggattaatcaaaagcatcggcgtgtgcaacttccagatccatcacctgcaacgcctgattgatgaaactggcgtgacgcctgtgataaaccagatcgaacttcatccgctgatgcaacaacgccagctacacgcctggaacgcgacacacaaaatccagaccgaatcctggagcccattagcgcaaggagggaaaggcgttttcgatcagaaagtcattcgcgatctggcagataaatacggcaaaaccccggcgcagattgttatccgctggcatctggatagcggcctggtggtgatcccgaaaagcgtcacacctagtcgtattgccgaaaactttgatgtctgggatttccgtctcgacaaagacgaactcggcgaaattgcaaaactcgatcagggcaagcgtctcggtcccgatcctgaccagttcggcggctaacatgcaaattctcccggtggcggtaatgttccgctaccggacttttcagaaatcatttattcccctcgcgtcccgcccgttgttactcttccttgttcaggaatgccaaatataaggacatcatcatgcagagccggaagctcttaaaagaacaactcatctatatccgggataaacgcaacggagaggtgaaaaacagatgaaaataatacttctgtttttagcagccctggcaagttttaccgtacacgcacagccccccagtcagaccgtagaacaaacagtccggcatatttatcagaactataaaagtgatgccactgccccttattttggtgaaaccggagagcgggcgataacttctgcgcgtattcaacaggcgcttaccctgaacgacaatcttacgctgccgggcaatattggctggctggattatgatccggtttgtgattgtcaggattttggcgatctggtgctagaaagcgttgcgataacccaaactgacgccgatcatgccgatgccgttgtgcgctttcgtatctttaaagatgataaagaaaagaccacgcagacactgaaaatggtggcggaaaatggtcgttgggtcattgacgatattgtcagcaatcatggcagcgtcttacaagcagttaatagcgagaatgaaaaaacgctggccgctttagctagcttgcaaaaagaacagccggaagcctttgttgccgaactctttgaacatattgctgattatagctggccgtggacgtgggtggtttccgactcttaccgccaggcggttaatgccttctataaaaccaccttcaagacggccaataatcccgatgaagatatgcaaatagaacggcaatttatttacgacaatccgatctgttttggcgaagagagcctatttagtcgcgttgatgaaattcgagtcctggagaaaaccgccgattccgcccgcattcatgttcgttttacgctgaccaatggcaacaacgaagagcaagaactggttttacagcggcgcgaaggcaagtgggaaatcgctgattttatccgcccgaacagcggcagcctacttaagcagattgaggcaaaaactgccgccagattaaagcaatgagctgaattaaataacaattagccggaacaataaataaaagggaacactatatgaaaacgattttcaccgtgggagctgttgttctggcaacctgcttgctcagtggctgcgtcaatgagcaaaaggtcaatcagctggcgagcaatgtgcaaacattaaatgccaaaatcgcccggcttgagcaggatatgaaagcactacgcccacaaatctatgctgccaaatccgaagctaacagagccaatacgcgtcttgatgctcaggactattttgattgcctgcgctgcttgcgtatgtacgcagaatgataaaaaaatccccggtagcgtgtcagttgccggggatattttttaacgtccaaccgccgctttaggccgtttcttcgcaccagcattcaccggacgagattgcgtagagctcgctttttttgccgtagcaggcgtctgacgctgggtcgccatcggcgtatgtttcgtcaacgccggacgggtattgcggttctggcgacgagcttcacgcatctcttcaatggttggcgcaggcactaagcaatcgcgacggctgccaatcagatgctttttgcccatcgcttccagcgcctggcggattaacggccagtttgccggatcgtggtaacgcaacaacgctttatgcaaacgacgctgtttgtcgcccttcggtacgaagacgtcttcgctcttataaccaatcttcgccagcgggtttttcccggtgtaatacatggtggtactgttcgccagcgggctcggatagaagttctgcacctggtcgaggcggaagcggtgctttttcagccacagcgccagattcaccatatcttcatcacgcgtaccggggtgcgcggagatgaaataggggatcagatactgctctttacctgcctgtttactgtaagtatcgaacagctctttaaagcggtcatagctgcccatgcccggcttcatcatcttgcttaacggcccttcttcggtatgttccggggcaatcttcagataaccgccgacgtgatgggtcgccagttctttgatatagcgcggatcttctacggctatgtcataacgcacaccagaggcaatcaggatctttttaatgcctttcagatcacgcgcacggcgatagaggttgatcgttggttcgtggttcgtgtccatgtgcggacaaatatccggataaacgcagctcaaacggcgacaagtttgttcagcgcgtgggcttttgcagcgcaacatatacatgttggcagttggcccaccaagatcggaaatcacgcccgtaaaacctggaacggtgtcgcggatcgcttcgatctcattaatgatgctatcttcggaacggctctgaataatgcgcccttcgtgctcggtgatagaacagaaagagcagccgccaaagcagccacgcataatgttgacgctaaaacggatcatttcgtaagccggaatacgggcattgccataggccggatgtggcacgcgcttgtatggcagcgcaaaaacgctgtccatctcttcggtagaaagcggaatagcaggcgggttgatccacacatagcggtcgccgtgtttttgcatcaatgcgcgggcacagcctgggttggtttcgtggtgcagaatacggctagcatgggcgtacagcactttatcgcccttcactttctcgaaagaaggcagcaacacgtaggttttttcccacggtttcgggcgcggtggctgcacggttacggctttggcttcctgctttttcggtgccaccggtttgttatccgcgcacggcaaatcttcaccatacggatgcgggattgggtcgatttttccaggggtatcaagacgggtggaatccacgccgctccagccaggcagcgcctctttcacgataatcgcggtattacgcacatcgcggatttcactaattggctcgcccatcgccagacgatgcgccacttccaccagcggacgctcaccgttaccaaacatcagcatgtcggctttgctatccaccagcacggaacggcgcacggtatcggaccagtaatcataatgcgcggtacggcgcagactagcctcaataccgccgaggatcaccggtacatctttccacgcctctttacaacgctgggtataaaccagtgtggcgcgatccgggcgcttacccgcgacgttatccggcgtgtaggcatcgtcatgacgtaaacggcgatcggcggtataacggttgatcatgctatccatgttgccagcagtaacaccgaaaaacagattcggtttacccagacgcataaagtcgtctttgctgctccagtccggctgggcgatgatcccgacgcgaaagccctgcgcttccagcatacgaccgcaaatcgccatcccgaagcttgggtgatcgacatacgcgtcgccagtaaccaaaatgatgtcgcagctatcccagccaagttgatccatctcttcacgagacatcggcaaaaacggtgccggtccaaaacaggcggcccagtactgcggccaggagaacaggtcgcgatccggttggatcagggagatagagctcattttgcttccagaaatgataaaaaaataatcaaaggccggggattataagccggaacgaaagagaaatcgaaaggtattccatactcgccctcctcgggcgagtatgaagattacggtaccggattgaccaacagttgcccaatgctgccacggtccgccatttccagcgtctgactgttgaagtagaacgggaagtgcgcccaggaaggctgaccgaaataaacaagcagctccacttgtccgtcaacccaaacggtatctttccagcctctgtcttccgggaacggcatcgcgccattcacgttacggatctggaacattacgccttcaatatggaacgcttgcggctcgtccgcgcgtaccgtccagcgttcccacgttccttgctgcgcggtgacatcaatacggttgacgtcccacagctgtccattaatacccgggtcatcacccagactgatatcgcgactgcgaattgggctaccagccatgatttcagttggcagcaagcgcatcggaagactgtctgtgaccagcggcagaaggccggttgggcgcagcgttagcaccagggtagaaaccagaatactggatggctcaaagaagccacgaatacgatcaacaatgctcgccgcttcgccacaggtgatgctcacttcatcgccgttgctcatatccaccagaatctcgcggcgctcgcccggtgccaggctaagttgcttcacgcttacaggagcaggcaggaatccctgatcgccagaaatcacatgtaacgggcgaccatcgttcatctgtagttgatagcgacgagagttgctcgcgttcagcagtcgcaagcgcacccagccacggctgacttcaacgtacgggctttgtacaccgttaaccagcagcgtatcaccaacaaagccgccgcttcccggttcgttgtattctggcgtaccaaagttatccagccgtttatcctggataatgaccggaaaatcatccacaccataatggttggggataggcaggctcttgctgacttcatcttccaccagccacattccggcaaggccgttatagacctgctgagccgtgcggttgggagtattggcgtgataccacagagtagctgcgttctggcgaatgggcagtacgggtgcccagtcagcgtttgggctcatcatccgtgccggaccgcccatcagcgggcctggtacctgtagcccggccaccgtcatactgacattttctgtcaggcggttgctgtaaataagcttaacatcgtcgcccttccagacgcggatagtcggccccaggtaacgaccattgattccccagacgctcgcgcgtgtccctggcgtaaaactccagtgcgcacgttgtacagtcataaacagcggttgcccacggcgagattcaagtagcggcggaacgggtagcggttgctgttgcccggctgcgctggccttcaggggaacagcgcctgcacaaagtgcaatcccgcttgcctgaatgaactgacgccgactgagactcatatttgctccatgtaaaactggctaaagtaataccgtgcaggaaagtgttccccgcaaaaatacagattgccgacttaaacttttccggcggcttcgcgttctgcgacttctttatcgagctcggcgattttttgttccattatgctacgacaatgggcagccagctcacgaacctgatctttgccatactgactgacgtcaattggcggcagcatttcgacaatcaccagaccgttgtgcagtcgattaagattaatcttattgctagttgtagagacgcacacgggaataatcgggacgcccgccgcaattgccgcgtgaaatgctccagtcttgaacggtagcaggccgcgaccacggctgcgggttccttccgggaacatccagatggaaatacggcgttttttgaagtgattcactacttccgcaatggtgccgtgagctttagtgcgattgtttctgtcgatcaataagttgccggttaaccagtacaactgcccgaagaaggggatccacagcaagctctttttacctaccgtcaccgtcggcggttgcacgatgttgcttgctgtcaccatgtcatagttgttctggtggttagcgatatagatagcattgccgtagctttcagcgtctgtaggtttacggcactcaactttcaggccaaacagcggcgcaagacggccaaacatatgcccaaaggtggccacatgtttcgggttacgcgggctgaaaaggcagtaaatggagccgaatacacagactaagatgctgtaaatcacggtaataataagacgaaagatatatagcataacaccctctgaaggtctgagagactggcattgtacgtcacctgaaatcaggttagggcattgttaaaagccgctctctggaaaagcgtattgttaatcgcaacgcatgaataaacaacggtttcaagggaatttttatcgtttccgggggttgaatacgctgccggatgacgacttaacgtttcatccggcgttccttgcaagcgggaggaaacagcgccctccccggcatattactcttcgctatcaccgctgctggcacggcgaggagagtcgatctcaacacgatcgatacgctgcaaaccgcgcatcaacgtaccgcggcgtccacgttcgccagtgactttctgtaactcttccgggcgcagtttaattttgcgtttcccaacatgaatggtcagcgtgctttgcggcggcagaacgtacaattgcgccagaccatcttctccacgcgcggcttctgcgcttggaatgttgataatcttgttgcctttgcccttgctcagctgcggcagatcacttaccgggaacatcaacatacggcctgcctgagtgattgccagcagcatatcggaagcatcttcaatcaccaccggcggcataacatgggcattttccggtaaggtgatcaaagccttacctgcacggttacgcgccaccagatcgttaaaggtgcagacgaaaccgtaacccgcatcggaagccatcagcagtttctgatcgtcgctttccatcagcatatggtcaacggtcgccccaggcggcaacgttaatttgccggtgagcggctcgccctgaccacgcgcgctcggcagcgtaatcgggtcaatggcatagctacgaccggtggaatcaacaaacactaccggttggttgctcttacctttcaccgccgctttgaagctatcacccgctttataattcaggcccggcgcgtcgatatcatggcctttagcgctgcgtacccagcccatctggctcagcacaatggtgacaggttcagacggcagcatgtcgtgctcgctcatcgctttcgcttcttcgcgttcctgcaacgggctacgacgatcgtcaccgtaggcttgcgcgtctgcctgcagttctttcttcagcaggttattcattttacgctcggaagccaaaatgccctgcaactggtcgcgctctttttccagttcactctgctcaccgcgaatcttcatctcttccagtttggcaagatgacgcagtttcagttcgaggatcgcttccgcctgggtttccgtaaggccaaaccggctcatcagcgccggtttcggttcatcttcattacgaatgatctcaatcacttcgtcgatattgagaaacgccaccagcaaaccttcgaggatatgcaggcgcttgaggactttctccagacgatagttcagtcggcggcgcacggtatcgcggcggaacaccagccattcggagaggatttccagcaggtttttcaccgccggacgaccatccagaccgatcatattaaggttaatacgatagctcttttccagatcggtggtagcgaagaggtggttcatcacctgatccatatccacgcggttggaacgcggcacaatcaccaggcgggtcgggttctcgtggtcagattcatcgcgcagatcgtcaaccatcggcagctttttgttgcgcatttgcgcagcaatttgctccagtacgcgcgcaccactaacctgatgcggcaatgcgctgataaccaccgcgccatcttctttcttccacaccgcgcgcatacgcacactaccacgtccgttctcgtagattttacggatctcggcgcggctagtgataatttccgcttcagtcggataatccggcccctgcacgatatccagcagctgatcgagcgtggttttcggctggtcgattaatgcgattgccgcctgagccacttcacgcaggttatgcggtggaatatcggtcgccatgccgacggcaataccggtggtgccgttaagcaaaatgtttggcagacgggcaggtagcattttcggctcctgcaaagtgccgtcgaagtttggcacccagtcagccgtcccctgccccagctcgctcaatagcagctcggaatatttgctcaaccgggattcggtgtaacgcattgccgcgaagcttttcggatcgtccggcgcgccccagttcccctgaccatcaaccagcggataacggtaagagaacggttgcgccatcaggaccatcgcttcataacaggcgctatcgccgtgcggatggtatttacccagtacgtcaccgacggtacgggcgctttttttaaatttggcgctggcattcaggcccagttcagacatcgcatacacaatgcggcgctgaacaggtttcagaccatcaccaataaacggcaacgcacggtccatgatcacgtacatggagtagtttaagtaggcgttttccgtaaattcatgtagcgcaaggcgctctgccatatcgctcattaattctgattcctcaacttattcgccagccttcaaaggggcaatattgccggagatactacattatctgccgcgtcgagtcacaggagatcaacgtgaatagcgccgccggacgtgctccgacggcgataaaggcatcaatgtgccttgatatacaactctttgctgtagacataatcctggggattatgcagcggaaaaccgccaacgtagggtttaagcagtttgattaacggctgatagtagataggaatcagcggtgcctgttggttgatgatcacttctgcctgctgatacaacgcattacgctttgtcgcatcagtgatctgcgtggcctggtttagtaaggcgtcatactgcgcatttttccagtgaccgacgttttcttcactatcgcttttgagcgtgttcaggaagctggaagcatcattgtacgtcgcatcccagctctgccgagacagcatgaaatcaccggctcgtcgggcatcaagataggttttccactccattgtgcgcagcgtcacctgtgcacccagccattttttccattcggaagacaacgctatcgcggtcttttcatgcagatcgtacttgttgtagaacagctcaaagcgtagcggatgagaggcgtcgtatcccgcctgtttcagcaaggcttttgccatcgcgacgcgctcactcattggcttttgcagttcatcgaacgtcgtcgcgctaaagccttttacctctggcggcgtcagcgtggttgcgggcgttctcaaccccagtaccttttgcgcaataagctgtcgatcaaccgtaagatatagcgcccgacgcactcgcacatcgttaaatggcggtttctcaaggttgaagttgtaatattcgctgttcagacgcggaataattcgtagctcgccaggcagacttttttcaatggcgggaatttgctgcgccggaacccaggtgagatcgacctctcccgcgcgatagcggttatagccggtgacgctattatctagcgccagatactcaacctgttgcaatactgtatgttgcgcatcgcggtactttggatttttgcgtgcagtaatcttttcgttaactacccactgatcaagcacaaaggcaccgttgtaaaccatgttctctggcttactccagctatcgccatgtttagcgatgacatgatgaggaaccgggaacagcgtcggccaggcgagcatcgtcgtgaaccaaggaaccggctgctcaagcgtaacttcaagagtacgatcatccgtcgctttgacacccaggcttgtaacatctgctttacccgcaacaatagctgcggcattgttaatgtgcgcctgtgccagatagccagcaaaagggcttgccgttttcgggtcaaccgcgcgctgccagccgaggacaaaatcctctgccgtcagaggctgaccgtcggaccactgcaaaccgctacgcagatggaaaatatagcgcttgccgccgtccagtatctcccagcgttcagcctgagcgggctgcacctggccttcaccgtccatccataccagaccttcaaacagatccagcacaatctgcgcggcagtattctcctccaccttttgcgggtcgagcgtacctgggtcgctatgattgttgtaacgaaagacttgttgcggggcgagcggtgtgttggcgggaacgtcagcagcgtagagaggagccgcacttaccaggctgaccagccataataaatttcgcgtatacatggtattccttaccggagaaattataagcccaacaacaatacgcctgtggcattgttcgctcaaacttatcgcgagtgatttggctcacactccggtaaagaaaaaagcgagttgcccccgcttttccattaattaacggatttcattcaatagttctggatgcttatccagaacacgtaaaagtttgattgtggaaggatgaggttgggcattgcctttttcgtaacggctaaacgcatttacacctcccccaaaaatttcgcttgcctctttttgggtaagagagagcttttttcgaaccttcactataaattcaggtgccactgtttcggcattcacgctagcccgaaatgcctttacttgcgccatgaaagcatcactctcttctttattcatgatgctctcttcgcaatggacacaatataaaccgtggatacctttcaatactgtttttcgtccacggaaggtgtatggaatatctttaatgccagaaaccatttctccctggtggcaaaccggacatttcatattacttctccttaaagctgacgatcagtacgtcatgaattaccgtaattttaagataaacctggcctgtaacaagcctgggtctgtaaacatcctgccagatagtatgatcagagtaggtggtcatgcttttataaaagtcgctctcacttaatccaatgataacattacacataccatcaaaatccaaacctaactcatctgcatttaacagggcactacgtgttgtacgaacttgcccggcattgacaagttttttaacctgactcaaacgtgtatgtggtgtgcgtttttccataacccccgcctccctgttactttagttataacctaaaaggttaattacagcaatgaaaaagcacctaaaaggttagttagatgtacggagatagtgaccacacaaaacgtattctttaaggaaagtgattgaccatataagaaagtggcgcattagtagcgccagtttgaagcaggaatttataagggaagctggagtcaggcatcacgccaacggcacataaacatccgtttccagtcgctgctctgtcaccccttcggcaagattggtgtagtgaaacagaatcggtgctttacgcattttctcgccgcttgcaggcagccagtggcgaatgatgccccataccgtgtgactaatatcgtccagctcgccaacgtggcgggccacggcataacgtccaccggtaagttcaccattgctcacaccataacgattatcgggaatcggttcgctaacgctgccgcagatatcaaagcgaaacgcttccggtgcggtggtggcagggtcgtcccaggcgacgccaaaagtctggctttggttaacaggagaaagcccgtctctttacgccacatgataaatttcgccacgctgtagttgagcaattcagggctacagcggtgcggcaacatcgccacaggtatacttgggaaatcgataatgtttacatccagtgtcaggtttgtcattttgcctccctgcgaaattattcccgggaacgcgtcccgggagcggtaacaattacggatttactttgcggatctgtttgacgtcaatttcaacagaattccagtctttatcgacttcaccctgaatctcaaccgtatctttcggcgtcaccgtcacgccgttccagcgtttgtggtcgatatcaacattgatagtaccgctggcatctttgaacacgtagagatcgtcagagatgcgttcaacgatattgccgcgcagggttacccaggtgtcgtcacgcagggattttgcgctttctacagtcgttacgctgccgttcggcccctggaatcctccggcctgactttgcgttgcgcttgggccagaaaaaccgccctgctctgctgccatcaccggtgcgctgcacagggccattactgcgattactgctgcgaattttttcatgtttattactccctttaatgtctgtttccgagcatttaacaagatagtccttaacaacttcttaagggaaaaaaataaaatttagtgctgtacagagcgcgttacaacacggtttactggcagcaaatacggttatcgcagggatgaaaaaatgcgaattttactgatagaagatgacatgctgattggcgacggcatcaaaacgggccttagtaaaatgggttttagcgtcgactggtttacacaaggtcgtcagggaaaagaggcgctttatagcgcaccttatgatgcggtgatcctggatttaaccttaccaggcatggatggtcgcgatattttgcgcgaatggcgagaaaaaggtcagcgtgagccggtactgatcctgaccgcgcgcgatgcgctggcggaacgtgtagaagggctgcgtctgggagctgacgattatctgtgtaaaccttttgcgttgatagaagtcgccgccaggctggaagctctgatgcgccgaaccaacggccaggccagcaacgagctgcgccacggtaacgtcatgctcgaccccggcaaacgtatcgccacgctggctggcgaacccttaacactgaaaccaaaagaatttgccctgctggaattactgatgcgtaacgctggtcgggtactgagccgcaaactgattgaagagaaactgtatacctgggacgaagaggtcaccagtaatgccgttgaagtgcatgtgcatcatctgcgacgcaaactcggtagtgattttattcgtaccgtgcatggtattggttacacattaggtgagaaatgaaatttacccaacgtcttagtctgcgcgtcaggctgacgctaatctttttaattctggccagcgtgacctggctgctttccagctttgtcgcctggaaacaaacaacggataacgtcgatgaattgttcgacacccaactgatgctgtttgccaagcggttaagtacgctcgatctcaacgaaatcaacgcggcggatcgcatggcacagacgccaaatagattaaaacacggtcatgttgatgacgatgcgctgacctttgccatctttacccacgacggcagaatggtccttaatgatggcgataacggagaagatattccctatagctatcaacgggaaggttttgctgacgggcaactggtcggtgaagacgatccttggcgttttgtctggatgaccagtcctgatggcaaatatcgcatcgttgttggccaggaatgggaataccgtgaagacatggcgctggcgattgttgccgggcaattgatcccgtggctggtcgcactgccgattatgttaatcatcatgatggtactactgggtcgtgaactcgcgccgctgaacaaactggcgctggcactacgtatgcgtgaccctgacagcgaaaaaccactaaacgcgactggcgtacccagcgaagtgcggccactggttgagagcctaaatcaactgttcgcccgcacacatgcgatgatggttcgtgaacgacgctttacctccgacgcagctcacgaacttcgtagcccgttaacggcgctgaaagtgcaaaccgaagttgcgcagctctctgacgatgatccgcaggcgcggaaaaaagcactgctccaattacattccgggatcgatcgcgctactcgtctggttgatcaactgctcacgctaagccggctggacagtctggataaccttcaggacgtcgcggagatcccgcttgaagatctcctgcaaagcagcgtgatggatatttaccacacggcgcagcaggcgaaaattgacgtgcgactgacactcaatgcccacagcatcaaacgcaccgggcaaccgctattgctaagtttgttggtgcgaaatttgctggataacgccgtgcgctacagtccacagggcagcgtggtagacgtcacgctgaatgctgataatttcatcgtgagggataacggccccggtgtgacaccagaggcactggcgcgaattggcgaacgcttctatcgcccacccggacaaaccgctaccggcagcgggcttgggctaagcattgtccagcgaatcgccaaattgcatggcatgaatgttgaatttgggaatgcggaacaaggtggatttgaggcgaaggtaagctggtaacttctctgtctatgagagccgttaaaacgactctcatagattttattaatagcaaaatataaaccgtccccaaaaaagccaccaaccacaaaccagacaaataccgaggctgaatacatatacccaaaactcgaacatttcccgcataaagagttttcttaagataagaataataagtggcgtaagaagaaaaaatgctgcaatcattgcttgcaatatacgatcttcgccactaacggaaggtatactgcaaatatttcctccgctctcaagcatccagtcatacttattgaaagcaaaaaaagaatctattaaccaataagtaagcattatatatagcaatgcttcaaatattgttttaattttctgctttaacatatatcagtacgctcataaaaatccatttataattatcaacatgacacgttgatactttcatcttttacttattcaaagccatattttcaatccccaaaaaaaccgaaccaaacgtgtaaattattccggtgcgagtaagaattatgaggaatggctatcagtattgtcattttcagaaaatatttatcctgcatcggtgagtcagagtaagatcagacttttgctaaattcgcaaaagactttgcacattttgctaatttcaccgtaccgctctgtgacgtactatagtcggcaaacgtctcaccttgaggttaaaaaatgagcaacatcctgattatcaacggcgcgaaaaaattcgcccactccaatggtcaactgaacgacaccctgaccgaagtcgcggatggcacactgcgcgaccttgggcatgatgtccgcatcgttcgcgccgacagcgactacgatgtcaaagcggaagtacaaaactttctctgggctgatgtggtgatctggcagatgccaggctggtggatgggcgcgccgtggacagtgaaaaaatacattgatgatgtattcaccgaaggtcacgggacgctgtatgccagcgatggtcgtacccgcaaagatccgagcaaaaaatacggttccggcggcctggtacagggcaaaaaatatatgctttctctgacctggaacgcaccaatggaagccttcaccgaaaaagatcagttcttccacggcgttggcgttgacggtgtgtatctgccgttccataaagcaaaccaattcctcggtatggaaccgctgccgacatttatcgctaatgacgtgataaaaatgcctgatgttccccgctatactgaagaatatcgcaagcatcttgtggaaatttttggttaactagagctcaggctttagaaggagttaaccatgcttaccgtaatcgcagaaatccgtactcgtcctggtcaacatcaccgtcaggcggtattggatcagtttgctaaaatcgttccaaccgtactgaaagaagaaggttgccacggctatgcgccaatggtggattgcgcagctggcgtgagtttccagtctatggcaccggattctatcgtgatgattgagcagtgggaaagcatcgcgcatcttgaagcgcatctgcaaaccccgcacatgaaggcgtatagcgaagccgtaaaaggtgacgtgctggagatgaatatccgtattctgcagccagggatttaatcctgccttgtttgcccggccatcctgaccgggcaatgttctttcctttaaacctcaatctccgccatgtcgcctttctcttgcaaccagttgcggcgatcttcgctgcgtttcttcgccagcagcatatccatcatcgcgtcagtacgctgatcgtcttcatcatcgatagtcaactgcaccagacgacgagtgttcggatcaagcgtggtttcgcgcaattgcatcgggttcatttcccccagacctttaaaacgctggacgttcggcttgcctttcttgcgttttaattgctcaagtacgccctctttctcttcttccgtcagcgcgtaataaacctctttcccgagatcaatacggtagagcggtggcagtgcgacgtaaacgtgaccgtgtttcaccaacgcgcggaaatgttttacgaacaaagcgcagagcagcgtggcaatgtgcagaccatcagagtccgcatccgcgaggatacagattttgccataacgaagctggctcagatcgtcgctgtcaggatcgataccgatcgctacgctaatatcgtgcacttcctggctagccagcacttcgtcggaagagacttcccaggtgttaaggatcttacctttcagtggcatgatcgcctgatattcgcgatcgcgcgcctgcttggcagatccgcctgcggagtcaccttccacaaggaacagctcggtacggttaaggtcctgcgcggtacaatcagccagtttgccaagcaacgccgggccgctggtcagctttttacgcaccacttttttggccgcacgcatacggcgctgggcgctggaaatcgccatctccgccagcagttcagccgcctgaacgttctggttcagccacaggataaaggcatctttcaccacgccagaaacgaatgccgcgcattgacggctagagagacgctctttcgtctgcccggcaaactgcggatcctgcatttttacactcagcacataggcgcagcgatcccagatatcttccgcgctcagctttacaccgcgcggcagaatattgcggtattcacagaactcacgcatcgcgtccaacaggccctgacgcagaccattaacatgggtaccgccctgcatcgttgggataaggttgacgtagctttcggtcagcagttcaccgccttccggcagccacagtagcgcccagtccacagcttcagtatcaccagcgaaattaccgataaacggtttttccggcagcgtcggcagaccatttaccgcttccgccaggtaatcattcagaccgtcctgatagcaccagcgttgttcggtattgttgatctcatctttaaaagtgatctcaacgccagggcacaataccgctttggctttcagcacatgcgtcaggcgactaacagaaaatcgcgggctgtcaaagaaggtttcatccggccagaagtgcacactggtaccagtattgcgtttaccgcaagtgccgacaacctgtaaatcctgcaccttttcgccattttcaaaggcgatgttataaacctgaccatcgcggcgcacgttaacttctacgcgcttgctcagggcgttaaccacgctaatccccacgccatgcaggccgccagagaactggtaatttttgttagagaatttaccgcctgcatgcagacggcaaagaatcagttcaaccgccggtacaccctcttccgggtgaatatccaccggcatcccgcgcccatcgtcaataacttctaagctctggtcagcatgtaaaataacgtccacgcgttttgcgtgacccgccagtgcttcatccacactgttatcaatgacttcttgccccaaatggttagggcgagtggtatcggtatacatccccggacggcggcgaaccggctcaagcccggtgagtacctcaatggcatcagcgttataagtttgcgtcatggtttaagttagtaattcgagttgatcgtcagagatggtgcagaccaagaaaatcgacgatcgggttgaaataatcttcgaagcccgtgaatgcgtggttgccgccttctatgacagtctggcggcaggaagcgtagtacgccaccgcctggcggtaatccagcacttcatctcccgtctgttgcagcagccagatcaaatccggcgcttccagcgggtcaatctgcatgactttaagatcgtaaatatggcgactctctagcacatattgctgcccggtgtaggggttctcgttctgaccgagatagtccgtcagcagttcaaacgggcgcaccgccgggtttaccaccactgcgggcagcataaaacattgactcaaccaggtggcgtaatatccccccagactgctaccgacaatacccaggctatcaccgccatgttccaggacaatggattccagcagctctgccgcgtcggaaggatacggcggcaactgcggaatgatcatctcaacgtcagggtgatgttccgccagccagttttttaacaagctcgcttttgcagagcgcgggctgctgttgaaaccgtgtaaataaagaagcgtagacatcagtagccttcactagcggtatcaggttggaaacgtgtgtccgccaggcgatgcacctcggtggtcagcgtgccatcagcatgtaactcgagagtacgccagccgggcgcgatggtatccagcgtaaagttggaacagtgcggcttaaactgcacacaggtgctcggcgttgccagcaggcggcgaccattccagtcgagatccagctcctgatgaatatgaccgcacagcaagtatttgacgtgcggaaacttcgccagcacggtatccagttcgcccgcgttacgcagactgtgttgatcgagccaactacaacccgcaggtagcggatgatgatgcagcagcagcaacgtatggcgttctggcgcatcggccagtttacgttccagccactcaagctgaaactcgctcagctcaccgtgcggcacgccaaacacctggctatccagcaacaggatttgccattgctcaccaataaacacgcgcttcgccggggagatacccgcatcctgtaacgcgctgtacatcgcgggctggaaatcgtggttgcccggcagccagacgcagggcgcacgaaaacttgcgatgccttcagcgaaatgctgataggccgcagaggattgatcctgcgctaaatcacctgtcgcgacaatcaggtcgaattcgtgctggtgtggccgaatcgcctccagcaccgcctggtaactctcccaggtgtttacccctaacagggcttcgtgcttttgtgcaaacaggtgagtgtcggtaatttgtaaaatcctgactctggcctcaccagccagaggaagggttaacaggctttccaaatggtgtccttaggtttcacgacgttaataaaccggaatcgccatcgctccatgtgctaaacagtatcgcaaccagtccgctaaaaactgattaatttgatgcttttcgtcgcgttgatgcaactttttattaggataatcataccgcgctttgaagcgaaaaatctgctggctactacacacttcagccaccatcgcgtcatgatacagacgcaccgtcatactcggaaggctccagtaactgatcgcgggcgcagtctgttctattgtcaccagggtagtgtatcgggtgctttccacaatcgtcagccgatattgtgcgtttgccacctgatagcttacagtttcgccgggtgcgtcattgcgcggtaacaaacggcgcaattgactaaagttcatctcgcacaggcgcatcatttcaggaaagtcaggtgtgtaacgcttcatttatgcccactcattttttaacgcttgatgatgcagctgcagccattgcaaagcgatgacgctcgctgcgttgtcgattttcccctcttctacccactggtatgcctgttcccggcttaccacatgaacgcgaatatcttcgttttcatcagccagaccgtgaataccgcttgcggtcgtggcgtccacttcgcccaccataatactgctacgctcactggtgccccccgggcttgccaggaaacttaacaccggtttggtccgtttgactatcagtcccgcctcttcaatcgcttcgcgacgggcaacatcttccacactttcaccctcttcaatcatcccggcaaccatctccagtagccaaggggtttcgctggtgtcgtacgcggcaatccgaatctgctcaatcagcacaacttcatcacgcactgggtcaaagggtagcaagactgcggcgtgaccgcgctcaaaaatttcccgccgcacctcatgactcatttgcccgttgaatagacgatgacgaaatctataaagatctaaactaaaaaagccgcgataaagtgtttctcgtgcaataatttctacatcgtttttgccaaatgtaacgggcaggttgtctggcttaagcattgttaatgtcctggcactaatagtgaattaaatgtgaatttcagcgacgtttgactgccgtttgagcagtcatgtgttaaattgaggcacattaacgccctatggcacgtaacgccaaccttttgcggtagcggcttctgctagaatccgcaataattttacagtttgatcgcgctaaatactgcttcaccacaaggaatgcaaatgaagaaattgctccccattcttatcggcctgagcctttctgggttcagtagcttgagccaggccgagaacctgatgcaagtttatcagcaagcacgccttagtaacccggaattgcgtaagtctgccgccgatcgtgatgctgcctttgaaaaaattaatgaagcgcgcagtccattactgccacagctaggtttaggtgcagattacacctatagcaacggctaccgcgacgcgaacggcatcaactctaacgcgaccagtgcgtccttgcagttaactcaatccatttttgatatgagcaaatggcgtgcgttaacgctgcaggaaaaagcagcagggattcaggacgtcacgtatcagaccgatcagcaaaccttgatcctcaacaccgcgaccgcttatttcaacgtgttgaatgctattgacgttctttcctatacacaggcacaaaaagaagcgatctaccgtcaattagatcaaaccacccaacgttttaacgtgggcctggtagcgatcaccgacgtgcagaacgcccgcgcacagtacgataccgtgctggcgaacgaagtgaccgcacgtaataaccttgataacgcggtagagcagctgcgccagatcaccggtaactactatccggaactggctgcgctgaatgtcgaaaactttaaaaccgacaaaccacagccggttaacgcgctgctgaaagaagccgaaaaacgcaacctgagcctgttacaggcacgcttgagccaggacctggcgcgcgagcaaattcgccaggcgcaggatggtcacttaccgactctggatttaacggcttctaccgggatttctgacacctcttatagcggtagcaaaacccgtggtgccgctggtacccagtatgacgatagcaatatgggccagaacaaagttggcctgagcttcagcctgccgatttatcagggcggaatggttaacagccaggtgaaacaggcacagtacaactttgtcggtgccagcgagcaactggaaagtgcccatcgtagcgtcgtgcagaccgtgcgttcctccttcaacaacattaatgcatctatcagtagcattaacgcctacaaacaagccgtagtttccgctcaaagcagtttagacgcgatggaagcgggctacagcgtcggtacgcgtaccattgttgatgtgttggatgcgaccaccacgttgtacaacgccaagcaagagctggcgaatgcgcgttataactacctgattaatcagctgaatattaagagtgctctgggtacgttgaacgagcaggatctgctggcactgaacaatgcgctgagcaaaccggtttccactaatccggaaaacgttgcaccgcaaacgccggaacagaatgctattgctgatggttatgcgcctgatagcccggcaccagtcgttcagcaaacatccgcacgcactaccaccagtaacggtcataaccctttccgtaactgatgacgacgacggggcttcggccccgtctgaacgtaaggcaacgtaaagatacgggttatctgccgcattcttcccccttcagccttcaatttcgaccagccatcctctattctgatgggtatttaccactggtcccggaagacaaaaatgaaacggacaaaatccatacgccacgcatcgttccgcaaaaactggagcgcacgccatctgacaccagtcgctctcgcggttgccactgtttttatgctggctggctgtgaaaagagtgatgaaacagtgtctctctatcaaaatgctgacgactgtagtgctgcaaacccaggcaaaagcgccgaatgtaccaccgcgtacaacaatgcgctgaaagaagccgaacgtactgcgccgaaatacgccacccgtgaagactgtgttgctgaatttggtgaaggtcagtgccagcaggcaccagcccaggctggcatggcaccagaaaaccaggcgcaggcccagcaatccagcgggagtttctggatgccgctgatggccggttacatgatggggcgtctgatgggcggcggcgcgggatttgcacagcagccgctgttctccagcaaaaacccagccagtccggcttacggtaaatataccgacgcgacgggtaaaaactatggcgcagcccagccaggccgcaccatgaccgtaccgaagacggcaatggcaccaaaaccggcgaccaccactaccgttacccgtggcggttttggtgaatctgttgccaaacaaagcactatgcagcgtagtgcaaccggtacctcttctcgtagtatgggtggctgataccgatggaaagagtcagtattaccgagcgcccggactggcgtgagaaagcccacgaatacggtttcaattttcacaccatgtacggcgagccgtactggtgtgaagatgcttactacaagttgaccctcgcccaggttgaaaagctggaagaagtcaccgccgaactgcaccagatgtgcctgaaagtggtggaaaaagtgatcgccagcgatgagctgatgaccaaattccgcattccaaaacacacctggagttttgtgcgccagagttggctgacgcaccagccaagcctttatagccgtcttgatctggcgtgggatggcactggtgaacctaaacttctggaaaataacgccgatacgccaacgagtctatacgaggcggcgttctttcagtggatctggctggaagatcagcttaacgccggtaacttgccggagggcagcgaccagtttaacagtctgcaagaaaaactgatcgatcgcttcgttgagctgcgtgaacagtatggcttccagttgctgcatctcacctgctgtcgcgacacggtggaagatcgcggaaccattcagtatttgcaggactgcgcaacggaagctgaaattgctactgagttcctctacatcgatgatatcgggttaggtgaaaaaggtcagttcacggatttacaggatcaggtaatttccaacctgttcaaactgtatccgtgggaatttatgttgcgtgagatgttcagtaccaagctggaggatgcaggcgtacgctggctggaaccggcgtggaagagcattatctccaacaaggcacttctaccgctactgtgggagatgttcccgaatcacccgaacctgctgcccgcttattttgcggaagatgatcatccgcaaatggaaaaatatgtggttaaaccgatcttctcccgtgaaggcgcaaacgtgagcatcattgagaacggcaaaaccattgaagcagcggaaggtccgtatggcgaagaagggatgattgttcagcaattccacccgttaccgaaattcggcgacagctatatgctgattggtagctggctggtgaacgatcaacccgccggaattggcattcgtgaagaccgtgcattgatcacccaggatatgtctcggttttatccacatatttttgttgaataagccacgataccggatggcactcgccatccggtaattgttagcctatctgcacgctcagcatactcaggctgcccatttctataccctcaaccggaatggtaattggctcctgcccatcccacgcacctaacacatacaacaacggcaaataatgctctggcgttgggttgcttaacgtgccaccttcatggtcgaggtaattcaccagaggatgttgttccactggcccttgccacgtcagattcgctttcacatactcattaaagctcgtcgcccacggatacggactactatcaccgtgccacttcactgtgcgcaggttatgcaccacgttaccgctggcgaccaacattattccttcatctcgcagcgctgccagtttgcgccccatttcgaaatgccaggcggcaggtttgctactgtcgatactcaactgcaccatcgggatatcagcgtcaggatacatcttaatcagcacgccccagctgccgtggtcaaagccccaggcttctttatccagcgtcaccgggatcggcgctaacagctcaaccagacgctgtgccagcgcagggctacccggagcaggataatgcgtatcgtacagcgcctgcgggaagccaccaaagtcatgaatcgtgggcggcgtctccatcgcggtcactcctgttccacgggtaaaccagtgagcgctaaccaccacaatcgcttgcgggcgtggcaatgtcatccccaacttctgccagctgcgggtatacaaattatcttccagcacgttcatcggactaccgtgacctaaaaacaatgctggcatacgtgtactagacatgatgatatccttaactaaaggtgtcattttgatatcctcacaatacgcttgttcggcggagtaagaacccggataacaatgatgatgatcatcagttattttgacgatctgcctgaaggtgaagatttataaggagttgtcgatgagtgtacctctcattctgaccatactggcgggggcagccacgtttattggcgcgtttctcggcgttctcgggcaaaaacccagcaaccgcttactggcgtttagcctaggttttgcggcggggatcatgttgctcatcagtttaatggaaatgcttcctgccgcactagcagctgaaggaatgagccctgtgttgggttatggaatgtttatcttcggtctgcttggctattttggcctggaccgcatgttgccacatgctcatccgcaggatttaatgcaaaaaagcgtgcagccgttgccaaaaagcatcaagcgcacagccattctgctcactctcggcatcagtctgcataacttcccggaagggattgccacctttgtcacggcgagcagcaacctggagctgggatttggcatcgcactggccgtcgcgttgcacaatatccctgaaggtctggcagtggcaggcccggtttatgcggcaacggggtctaaacgcaccgcgattctgtgggcggggatttctggactagcagaaattcttggtggtgtgctggcgtggttaatcctcggtagcatgatttccccggtggtcatggcggcaatcatggcggcggttgcaggaattatggtggcgctcagcgttgatgaattaatgccgctcgccaaagagattgaccctaataataaccccagctatggcgtactatgtggaatgagtgtgatgggattcagtttagtgctgctacaaacggcgggaattggttaaaaacaacatcagaagttgtccagcgcatggacaacttctgccagcttcacgaaagccttattctaccttttcggctgtctcttctctcgtactgtttaagtatttgttccgcgcttcaagcagtgcgtctctgtcctggcgaaacgcccgacaataacgtttcaaatgcaggaaataacccaccacaaccagagcaatcaatacaatccagtaccaggcgataaacatccttttacccttaatatttaacaatactaaacatttagcgtataaatttcacatatcctttttcggatatattcatatggtcgcataataacggaacaattatatgattttgatcataatgaaaaagaatgcctgatattaatgaaattttctcatagaaagagaagcggaattaacatcttgcatagcagggaaaaataaaaaccgaagcctgctacaacttcggtttcttgattaaggcagtaaattaagcagcggttttcagctggctttacgctcatgtgcctgacggtatgccaccaggtcttcaatagtcacgagcgccatattgtgtttattggcaaactcaatacactctggtgcacgcgccatcgtgccatcgtcattagtcagctcacacagtacaccagccggtttaaagcctgccagcgtcatcagatcaatagttgcttcagtatgaccgccacgcgtcagtacaccacctgcctgagcgcgaagtgggaaaacgtggccaggacgattcagatcactcggttttgcgccatcggcaatcgctgcgcgaacggtcgtaatacggtcagcggcagaaacaccggtagtcacaccttcagctgcttcaatggtcacggtaaaaccggtgccataggcgctggtgttattttctaccatcattggcagatcgagttgtttacggcgatcttcagtaatgcacaggcaaacaataccgctaccgtggcgaatggtcagcgccatctgctcaacagtcatggtttctgccgggaagatcatatcaccttcgttttcacggtcttcatcatcaagcaccattacaccgcgtccttcacgcagcgcagccagtgcattttcaacacgttcgaaaggcgtaccaaaagaggaaagtagcgtctgattcatggtaaaaaaacctcactaaaattatggttaccagaatcagggcagtcttaggagtggcggcatatagccaaaataacgtgagcgggtccatgcccgacagaatcgttactctctcccatccggactctaaccgtcggccccggaattacaccggatctgctgtcctttgagttcgcacccaaagcgctcgcgggctttcaactgagttgatttaccgccggtggggaatttcgccccgccctgagaataagcggattcactataacgctaatgattagcggcagcaacgcatagcttcacataattctggtttatatctaatacaaacactaaaacgggccatcaggcccgttatatcagtgctctaactccagctctcttgcctgcatcatctgttgacaataccaggcataacgtgcgcaaaaccaggttctatgttcttcatccatgttaccagtaacggccagaatatcgaccgggcgaccttctgcgtgcattctggcaaaactacgcgccaggaaatcgaaattatttaaagaattaagactatgatccataagcacatcctccggttatcgcataccttttaaggccatatgctttttctgatttcagtattccccaatcagtgtagtgcctttaaacataacgtgcgtaaatatattgtccccgatcacactttttagtgaaaaataaaaaaccatattaaaagactttctcttccagaacttctctaacctgtgttattattaacacagataaatgtaagcaaggaaactattacaaagtaaatattgcgtcactaaatggacattggagtgatatatgattttattcgccgactataacaccccttatcttttcgctatttcctttgtactgttgatcggcctgttagaaatttttgcgcttatctgcggtcacatgctctccggtgctcttgatgcacatcttgaccattatgattctataaccacaggtcatattagccaggcacttcattatctcaatattggaagattgccagctctcgtcgttctctgcttactggctggtttttttggtcttattggcatcctgttgcagcatgcctgcatcatggtctggcaaagtccactgagcaacctgttcgtggttcctgtcagtttactgtttacgattattgcggtgcattataccggtaaaatagttgcgccctggattccacgcgaccatagtagtgctattacagaagaagaatatattggtagcatggcgttaattaccggtcatcaagccactagtggtaatccctgcgaaggaaaactcaccgatcaatttggccaaatacattatttactactggagcctgaagaaggaaaaattttcactaaaggagacaaagtgttaattatttgccgactttctgcaacgcgatatttggcggaaaataatccctggccccaaatattgtaatttattaatcaaaaggaaatttaataatggatgatattgttaattctgtgccctcctggatgtttaccgcaattattgccgtatgcattctgtttattattggaattattttcgccaggctctatcgtcgcgctagcgcagagcaagcttttgttcgtactggtttaggtgggcaaaaagtggtaatgagcggtggcgcaatcgtgatgccgatctttcatgaaataatccccatcaatatgaatactctgaagctggaagtcagccgcagtaccattgatagcctgattacgaaagatcgtatgcgcgtcgatgtagtagtcgctttctttgtgcgggtaaaacctagtgtagaagggattgccaccgctgcccagacgctggggcaacgcaccctgagccctgaagacttacgtatgttggttgaagataaatttgtcgatgccctccgtgcaacagctgcgcaaatgaccatgcatgagttacaggatacccgcgagaactttgtgcagggggtgcaaaatacagtggcagaagacctgagcaaaaacggtctggaactggagagcgttagtcttaccaactttaaccagaccagcaaagaacatttcaatccgaacaatgcctttgacgccgaaggtttaaccaaactgactcaggaaacagagcgccgtcgccgcgaacgtaacgaagttgaacaggatgtagaagttgcggtgcgtgaaaaaaatcgcgatgcgctaagccgcaagctggagattgaacagcaagaagcgtttatgacgcttgagcaggagcagcaggttaaaacccgtactgccgaacagaatgcacgtattgcggcttttgaagctgaacgtcgtcgtgaagcagagcagacacgaattctggctgaacgacagattcaggaaacagaaatcgaccgcgaacaggccgtccgcagtagaaaggttgaagctgaacgtgaagttcgcattaaagagatcgaacagcagcaggtcaccgaaatcgctaaccagacgaaaagcatcgctattgccgccaaaagcgaacaacagtcccaggcagaagcgcgtgctaatctcgcacttgcagaagcggtaagcgcccaacaaaacgtagaaaccactcgccagactgccgaagccgatcgtgctaaacaagttgccctaatcgctgccgcgcaggatgcagaaaccaaagcggttgaactgaccgtgcgggcgaaagcagaaaaagaagccgcagagatgcaggcggcggctatcgttgagttagccgaagctacacgtaaaaagggtctggcggaagcagaagcacaacgtgcgctgaacgatgctatcaacgtactttctgatgaacaaaccagccttaaattcaaactggccttgttgcaggcgctgcctgcggtaatagagaaatccgttgagccgatgaagagtatcgacggtatcaagattattcaggtcgatggtctgaatcgtggcggcgctgcgggtgatgcaaacacgggtaatgtggggggcggaaacctggcggaacaagcattaagtgccgctctctcttaccgcacacaggcaccgctgattgactccttgctcaatgaaattggcgttagtggcggcagtctggcggcattgactagtcccttaaccagtacaactcccgtcgaagaaaaagcagagtaaaccctcttccaggaataatccctggcccaaaaagccggggattttttatatctgcgttccgctaaaaagtgcaaatgatcaggttgttgcagcattttgcgtgacggctcggggaaggcaaaactgcatcagagaaagcattgcgtggggtctggcgctcatcaacaatcggggagtcagcagggggctgaaacgggaaagcccctcccgaagaagggggccttacagaaggaaagggttatgatgaagctcgtcatcatactgattgtgttgttactcgtaagtttcgcagcttattaacagccaatcagaggggggagaaatcctccctcacccttgttcctttactttaggttgaaaaaaaatcagcgtcaagaaggtttcattaacacatatccctggcccaaaaagccggggattttttatatctgcgttccgctaaaaggtgcaaatgctcaggacgttgcagcgttttgcgtgaccgctcggggaaggcaaaattgcctctgggaaagcattgcgcggggtccggcgctcatcaacaatcggggggcagcaaggggctgaaacgggaaagcccctcccgaagaaggggccttgtataaggaaagggttatgatgaagctcgtcatcatactggttgtgttgttactgttaagtttcccgacttactaacaactcatcagaggggggagaaatcctcccttacccttgttcctttactctaggttgaaaaaacaacagcgtcaataggcctgccatgtacgaagcgagatctgtgaaccgctttccggttagccttttttatcctgttggatcttcttgatgatgttggtcgtgctgcaaccgtcttcaaagttgagcaccaacacttcgccaccgttggcccagacttctttactcccggcaatctcttctggtttatagtcgccgcctttcaccagcagatctggcaagatcccggcgatcaagcgctgcggcgtgtcctcttcaaagctcactacccagtcgaccgcttccagtgcgcccagcacaatcatacgctgttcgagtgggtttaccgggcgggaatcccctttcagccgtttggtggaggcatcgctgttgacggcaacaatcaagcggtcacccagcttgcgggcatttgccagataagagacgtgcccggcgtgcaggatgtcaaagacaccgttggtcatcaccactttttcaccacgtttacgcgctgccgctacggccagcttcagttcctcttcggtcatcacgccaaagcctgtatctgcacgtccacgtacagcattttccagctcgatcgggctaaccgtggaggttcccagtttgccgaccaccacgccagccgccgcattggcaaagaagcaggcttcttccaggctattacccgctgccagcgttgccgccaggacgccaatcaccgtgtcgcccgcaccggtaacgtcatacacttcctgcgcttgggttggcatatgcagcggcgctttacccggttgcagcaggctcataccctgttcggaacgggtcactaacagagcgctgagttcgtaatcggcaatcagtttcatgccgcgctcaacaatctcttcttcggtcttacatttaccgacaacagcttcaaattcgctgagattcggcgttaacagcgtagcgccgcggtagcgctcaaaatcggtaccttttggatcaatcagcaccggaacacccgctttacgcgccagttggatcatctgctgtacgcttgccagcgcacctttggcgtagtcagaaagcaccagcgcgccaatgctactcagcgcctgattaatccgctcgtgcagcggctgcggatcaacaccttcgaaaccttcttcaaaatccagacggatcagctgttggttgcgggaaagtacccgtaatttggtaatggtcggatgcgtcggtacagaaacgaagtcgcatttgacgttgacgtcggccagagatttactcagcgcgcgcgctgcatcgtcaatgcccgtcaacccgaccaggcgtgcattagcaccgagagaagcgatattcatcgccacgttagccgcgccgcccggacgttcttcgatggtattcactttaaccacgggcaccggcgcttccgggctgatacgactggtggggccgtaccagtaacgatccagcatcacatcaccaaccaccatcactcctgcacgttcaaactctggcagcgttactttcattcctgtctcctgagagattcaaaatttgcgcgcgataataccatacttcattcttccaccagccacttctgccagcttgcccgcaccagttcacgctctgcggtgaagcaatcctcgctcacatggcccggcaattcctgtaatgccagatgatgaagttcatcgcgaagcgtagtgtaagcacgggtcagcgccatcgcttcctgctcttccataatgtcgttttgcgccagtagttccagaatacgcacgttgtcactccagcgcgttaacttcggtttttcatgagcgtagcgcaacaccagatattgggtaataaattcgatatcggtaattcccccttcatcagctttgatatcaaagcgatcgcgatgtttattgccgagatgagcgcgcattttctcgcgcatttcccgcacttccgtttgcagagttttaccttcacgcggcagcgtcataatctcgcgacgcactgcgtcaaagtgcgcggtgagctgcggatcgccgtacactacacgcgcacgcaccagcgcctgatgttcccacgtccaggcctcgtttttctgataatcggcaaatgcttctgcggatgtcaccagcattcccgccgccccggacggacgcagtcgagcatccacttcatacaaaatgccggaagaggtacgcgtactgaacagatgcataatgcgttgcgccagacgcagataaaactgccgcccgtcgatttcccgctcaccgtcagtcatcgcatccattgggcaatcatggaggaagataaggtcaagatcggaactgtagcctaactcccagccgcccagcttgccgtagccgaccaccgcaaaaccacgcccttcgcgttcgttcaggtgattcggcttaccgtagcgggcaaccatttgaacccacgcctgctgaacgacggcatctatcatggcttccgccagccaggttaagtgatcgctcactttcatcaccggtagcgtaccggcgatatccgctgcggcgatgcgtaacagctgcgcctgtttgaactgacgcagcgcctcaagctgttgctcttcgtcatcttccggcacgcgcagcaaatactggcgcaactcatcgcggtaggcatcggtcgccgtcggctggtaaagggtgtttggatcgagcaattcatccagcaataatggataacgcgccagctggctggcaatcatcgggctcgcggcacacagagaaatcaaatgtttaagcgccgcggggaattcactgagcaattctaaataggtggtgcgggtaacaatccccaccagcaaggcggtaatgcggctcagcgtaacggcagcgtcttcacgcgcacagacatcacttagcagatgcggcatcagatggtcgagcacctgacgtcctcgcggcccgatggtgcgcttatccagctctttgcggaaatcggcaatcagcgttagcacctgtttgcgatcatcctcgctaagatgcgccagcactggcgtagtgtcatcttcctgcaacgcatcctgccacagctcacgccactgttcgctcaggctctcttcctgagtttcactttcatcgtcgccaatcaattcattaaacacccggcgcacattggtcatatgtgcggtcagcgccccggtcagttgcggccagtcagcaaagtccatcgcccacgccagccgcgcacgattaagctcatcagaaggaagcgtctgggtttgttcgtcgttaatgctttgcagcaggttttccagacgccgcaggaacagatacgccactcgcaattgttcagcatcgttttcagaaagcagatgcagctcggcaatggcgctgagcgttggcagtaaagagcggctttgcaggctcggttcgcgtccgccgcgaatgagctggaacacctgaacgataaattcaatttcgcgaatgccgcctgcgccgagtttgatattgtcggtcaaaccacgtcgacgcacttcacgggcaatcatccctttcatgttgcgcaggctctgaatcacgctgaaatcgatgtaacgacggaaaacaaacgggcgcagcatcgcacgcaactcgttagcatagacgccttcgctatcgcccataatccgcgccttgaccatcgcgtaacgctcccagtcgcgcccctgctcctggtaataatcttccaacgcggcaaagctcagcaccagcgggccactttcgccaaacggacgcagccgcatatccacgcgatagacgaagccatcctgcgttggttgatccagcactttaatcagccgctgccccatgcgggtaaaaaactgcgcgttatccagttcccggcgtccaccctgcgtacaaccatgttccggccaggcaaaaatcagatcgatatcagaggagaaattcagctccccaccgcccagcttacccatgcctaaaatcagcagcggttgcgcttcgccctgcgcattgcacggcgttccccactcgcggcagcaggcgtcatacagccagtcacgcgccgcaacaatcagcgtctccgccagatagctgagctgctgcaatatgctctcttcagtaaccagtgccagcgtttgcgcccaggcgatgcgcaccataatgcgccgccggaatagccgcagctcgcgcattaacccggcttcgtcactcacattacagagcgcctcctgcaaccatgccgcgtaatgctgccattcgtcggcctgcggcggttggctttccagttccgtcagccactctggatgcgcaatcacgctgtcctgcacaaaatcactaaaagtaagtacactcttcgcctgtgcgctaagactttcctcggctaaaggctctggcagccgctcaacaacggtctgccagtactgctgtaacggactagagagcggcttcataagcgattttatccttgcctgattaacgttttccgctgtgcaaccagaacggttcctgattgtttgcctcattacggaaatgttcaatttcgatgcgttgcccggtcgcaatagcgtgatgcagcccctgccagttctccagccaggcttgcgcgacgacaggatcatagtaacccgccagcaacagtatactgtcaatatcacgcgtcaggcgtggcaactggtcacggtagcgatcgcctaacggctggcagaaaacgcttttcagttcagcggcatggcgggaaagatggatatcggcaaagcgtttgaaggagtcgctgattttgccctgcgctttggcatctaaaaatggctgccatgctttgcttaccaaccattcggtcaacgccagcttcgccattgccgtttcggtagagtagaccgccgtcacggcagacaccgcagaagcaatggtcgcctcgcattgagtcagcagatcacgtaagtgagtgctcgctttacgcggcacaataccaccgaacagcatcagcgtatgacggaccaggctaatggctgccagcacctgttctttcgccgcatcgttgccgcgtacccacagttcttcatgatactgccattgcgctaacgccagctcgagcgccgcttccagcccctgttccacatcggcttttgccgcaacatgcaaaatggtggtcggtttgatttcacgcgccggattgccctgcgccagatgatagccacgcgccgctttgctcaggctgccctggcgtaatccggtttggcttaccagttggttcgccagtttcagcaccgcgcgcgtgtcgccgctaagcagttccagttccagctcacagataggttcagcaaattcacccgctttcacttccccctggtcgagggcgatttcaatttggctaccatcgaccgccaccagccatttttcgcgataaaaatcggtgctgaacagcggctgcacgcgggaggcgagatcggcgggcaattcgccgttcggccagacttccgtcggtaactgcgccaggtcgagcgtcggttcgctcaacgccacgttatattccgggcgctgatgtaagccgcctgtcactcttcctgcaactttcatggtcatctcatagcgaccgttttcgccacgaatacgtaagcccatatcgtgcccacgcagccagttatccggcgtttcgtagtaaatattcagcaactgcacggggtcatggtgctcgccgcccagcgtattgagatggtcacgcaacgcctcaacggcactgtgattaacaataaactttaattcgatttcctgagccatggcctttacttatcggttatgtcacataagtgacgatgaacggcgaacttaatgcgatcttttttgtcagtagatagtattttgcgccaaattgccatgcaacgggcaatttgacgggcgtaaaagtttgaagcagtggcaagacctgacacagaggattccgattgatgtcgaatgctttgcgtagcgacactgatgccactactatcgttccactttccatgacaataacgacagcctgatgccaaaattacgcctgatcggattaactttactcgcacttagcgcgactgccgtcagtcacgctgaagaaacgcgctatgtttccgacgaactgaatacctgggtccgcagcggtccgggagatcattatcgcctcgtgggcacggttaacgccggcgaggaagtgaccttattacaaactgacgccaacaccaattatgcccaggtgaaagacagctctggccgtaccgcctggatcccgttgaaacaacttagcactgagccaagcctgcgctcccgtgtgccagatctggaaaatcaggtcaaaaccctgaccgataaactcaccaatatcgataacacctggaatcagcgcaccgcagaaatgcagcaaaaagtggcgcagagcgacagcgtgatcaacgggttaaaagaagaaaatcagaaactgaaaaacgagctgattgtcgcgcagaaaaaggtcgatgccgccagcgtacagctggatgacaaacagcgcaccatcatcatgcaatggtttatgtatggcggtggcgtgctggggcttggcttgctgctcggtctggtactgccgcacctgatcccaagccgcaaacgcaaagatcgctggatgaactaaatcgccttcttcgttgcactgtcttattattaggaattgtgtatttgacgaagggatgatggcgtgaagatttatctggtcggtggtgctgttcgggatgcattgttagggctaccggtcaaagacagagattgggtggtggtcggcagtacgccacaggagatgctcgacgcgggctaccagcaggtaggccgcgattttcctgtgtttctgcatccgcaaacgcatgaagagtatgcgctggcacgtaccgaacggaaatccggttccggttacaccggttttacttgctatgccgcaccggatgtcacgctggaagatgatcttaagcgtcgcgatctgaccattaatgcgctggcccaggacgataacggcgagattatcgacccgtacaacggtctgggcgatctgcaaaatcgtctgttgcgccatgtttcccccgcttttggcgaagatccgttacgcgtattgcgcgtggcgcgttttgctgcgcgttatgcccacctcggttttcgtattgccgatgaaactctggcgttgatgcgcgagatgacccatgcgggtgaactggaacacctgacgcctgaacgggtatggaaagagacggaaagcgccctcaccacccgcaatccacaggtgttcttccaggtactgcgcgattgcggcgcactgcgcgttttattcccggaaattgacgcactgtttggcgttccggcccctgccaagtggcatccggaaatcgatacgggtattcataccttaatgacgctcagtatggcggcgatgctgagtccgcaggtcgatgtccgtttcgcaactttatgccacgatctcggtaaagggctgacgccgccagaactctggccgcgtcatcatggtcatggcccggcgggtgttaagttagtggaacaactatgccagcgtctgcgcgtgccaaatgaaattcgcgatttagccagactggtggctgagtttcacgatctcatccacaccttcccaatgctgaacccaaaaaccatcgtcaaattatttgattccatcgatgcctggcgtaaaccgcagcgtgtcgagcaactggcgctgaccagcgaggctgacgtgcgcggcagaaccggttttgaaagtgcggactacccgcaaggccgctggttgcgcgaagcctgggaagtggcgcagagtgtgccgacaaaagccgtcgttgaagcgggatttaaaggtgtggagattcgcgaggagctgacccgacggcggattgcggcggtagccagctggaaggaacaacgttgcccaaagcctgaatgagtattgggcattttgccggatgcggcgtaaacgccttatccggctacatgtcaacgacagttgtaggcctgataagacgcgcaagcgtcgcatcaggcgttgattgccggatgcggcgtgaacgccttattcggcctacgcaatcgttgacaacgccaagcatccgacactattcctcaattaaaagaacacgacatacaccgcagccgccacaataaagcgataaatggcgaacgggataaagctaatgcgcttaatcaattgcaggaaggttttaatcgctatcagcgccaccacaaaagcggtgataaacccaacggcaaacatcgggatatcgccgcttgtcaggaagccccagcttttgtagagatcgagcgccgttgcgcccatcatcatcggcaccgccagcaggaagctaaactcggaagcagcgtaacggctcacccccatcagcatcccaccactaatggtcgccccggaacgggagaaacccggccacagcgccagacactggaaacagccaatcataaatgcctgacgataggtcatatcatcaagacccggcgcacgcggctctttcggcttcaggcattcggcggcaatcagcaacaaaccgccaacgaccagcgcatacatcacatttatcgggttaaacaaactcttaatcgtgtcgtggaacaacagccccaataccaccgccggaatcatccccagcaaaatgtggatcagcgttaaacgacctttgctttcaccttcgtgctgcaacgggcggccaaagtggatgccaatcaggccaaacagacgccgccagaacatcactactaccgccagaatacttcctaactggatcacaacttcaaaggttttcgccgtgtcgccctcaaaccccaacaagtgaccgacaataatcatatggcccgtgctggataccggcagaaattctgtcaatccttcgaccacacccaatattgccgctatcagcaggctgtgcatatcgctcatcaataaacccctaaattattaaaatgtaccgcttgtccgaactactgcgtatgaccaggttataaccgtttggtttaacagctgtaaaattaattattttctttcagattattgccacgctcaatgattacgccaacattcgccgcccgcgccactgcgcctggcttgctgagtttgatacgcacccacgggctgttgaagcgtgctaacagcagctccgccacctcttcagccacgcgttccaccagcgcaaaacgcgccccctcgacgtggctgaccaccgtttctgcaatgtcagcgtaactgaggcaatccgccacatcatcacttttcgccgctttacggttatcccacgccatttcgatatcgaacactaacttctgttcgatggtctgttcccagtcgtaaacaccaatagtggtgattacgctaagttgctctataaatacaatatccatcacgtcctgcctgctttttggctaaccggataccacttccggcgaaatgtgcgtattatccacagattcatcgttgaacacgaattttcaaaacggaacagcttatgagtgcaatcgcgcctggaatgatcctcatcgcgtacctctgcggctccatttccagtgccattctggtttgccgcttgtgtgggctgcccgatccgcgaaccagcggctccggcaatccaggcgcaaccaatgtgttacgtatcggtggcaagggagcagccgtagcagtactgattttcgacgttctgaaaggaatgttgcccgtctggggcgcgtatgaattaggtgtcagccccttctggctaggcttaattgccatcgccgcctgtcttggacacatctggcccgttttcttcggatttaaaggaggaaaaggcgttgctaccgcttttggtgccatcgcacccattggctgggatctcaccggagtaatggcgggaacctggttactgaccgtgctattgagcggatacagcagcctgggagcgattgtcagtgcactgattgctccgttttatgtctggtggtttaagccacaattcaccttcccggttagcatgctctcttgcctgatcctgctgcgtcatcatgacaacatccaacgtctgtggcgtcgtcaggagacaaaaatctggacgaaattcaaaagaaagcgcgaaaaggatcccgagtgatttctggtggatttacatgacctgatagccttcatcgggcttgcccagccgttgctggcaccatgccgccagaaattccacgcagacacgtaatttcatgctgcgatagagcggctcccggtaaacagcccagatattggcgctttgtgcatactctggcaatacttgcaccagtttgccactctccagaaacggcaacacatcccactcggaacgcagcataatccctttaccctccagcgcccattgcagcacaatctcgccgctattggaggaaagatgcccgcttaccttcacgctttttttctcctgaccgttccccaactcccatattccatgggtcatatcgcgctctttggtcaccagacagtcatgacgacttaattcctgtagggattgtggctgcggatatttttgcagatactcaggtgctgcgcataatattcttttattttttgtcaaaagatgcgcaatataataatcaggaatttcgtcattaatacgaatatccagatcaatattatcctgcactaaatcaatttgccgatcgaacaattcaaaatgcacctgtaactcaggataattgcgcatcagttcggtaatagctggcgcaatatggctgcgcccaaaaccaaaactgcaaccaatacgaatcatcccctccgggcgcgttttgatttgcgtgacgtcatcgaccagtcgctgatattgggtgaggatttccaacgcatgttcgtaacaacgttggccactttcagtcagcgccacgccgcgagcggagcggttcagcagcgttgttgccagcgtattttcaaggatttggatccgcttggtgacaaatgcaggcgtctgcccaagcgtcgccgctgcggcgctaaaactcccgctgtgaacgatttctaccagtacctgcaagtctttggctaaaggccagctattcagcatcgttaattatccgcagttgtgataagcgcagtgtatttcgcaaaacattgccattccctgctctggcgcaatattcattcttattttcgcgttgattcacgaactgttaattacatattcacggtggcaaaaaatataaaaccacatttttagtggtagtttgtggcggtgaatttttccagacaaatacaaaaactggagttgccatgatgagcgaaagtaataagcaacaggcagtgaataagttgacagagattgtcgctaactttaccgccatgatttctacccgaatgcctgatgacgtggtggataaactaaaacagctaaaggatgccgaaacgagcagcatggggaaaattatctaccatacgatgttcgacaacatgcaaaaagcgattgacctgaatcgtcctgcctgtcaggacaccggggagattatgttcttcgttaaagtcggttcccgcttcccactgcttggcgagctgcaaagcatactcaaacaagccgtggaagaggcaaccgtcaaagcgccactacgtcacaatgcggtagaaatttttgacgaagtaaacaccggcaaaaataccggtagcggcgtaccgtgggtcacctgggacatcatccccgacaatgacgatgcggaaatcgaagtttacatggcaggcggcggctgcacgctacctggccgcagcaaagtgttaatgccgagtgaaggctacgaaggcgtggtgaaattcgtcttcgaaaatatctccaccctcgccgtaaacgcctgtccaccggtactggtgggcgtgggcatcgccaccagcgtggaaaccgccgccgtactcagccgtaaagccattttgcgcccgattggcagccgccatcccaatccaaaagcggcagaactggagctacgcctggaagaaggactcaaccgtctggggattggtccacaagggctgaccggcaacagtagtgtgatgggcgtacatatcgaatctgccgcccgccatccgagtaccatcggcgttgctgtctctaccggctgctgggcgcatcgtcgcggcacgctgctggttcatgccgatctcacctttgaaaatctgtctcacacccggagcgcgttatgaaaaagatcctgacaaccccgatcaaagctgaagatctgcaagatattcgcgtcggcgatgtgatctacctgaccggtacgctggtgacctgccgcgacgtttgtcaccgccgtttgatcgaactgaaacgtccgatcccttacgatctcaacggcaaagcgattttccacgctggccccatcgtgcgcaaaaacggcgacaaatgggagatggtctccgtcggcccgacaaccagtatgcgtatggaaagttttgaacgtgaatttattgagcagaccggcgtgaaactggtggttggcaaaggtggtatggggccgctgaccgaagaaggctgccagaaattcaaggcgctacatgtgattttcccggcaggctgcgcggtgctggcggcaacccaggtggaagagattgaagaagtgcactggacagagctcggaatgccggagagtctgtgggtctgccgggtcaaagagttcggcccgctgattgtctctattgatacccacggcaacaacctgatagccgaaaacaaaaagctgttcgccgaacgccgcgatcccatcgtggaagagatctgcgagcacgtccattacatcaaataaccctcccggagaggctcacccctctcctttttcgcaggcataacacgatgaaaccttccactgaatggtggcgatatcttgcgccgctggcggtcatcgccattattgctctacttccggttcccgcagggctggagaaccatacctggctctactttgccgtttttactggcgtgatcgttggactgatcctcgaacccgtgccgggtgccgtggtggcgatggtgggtatatccatcatcgccatactctctccctggctgctgttcagcccggagcagctcgctcagccaggctttaaattcactgcaaaatccctcagctgggccgtttccggtttttctaatagcgttatctggctgattttcgccgcctttatgtttggcacaggctatgaaaaaaccgggcttggacgccgcattgcgctgattctggtgaaaaagatgggacatcgcacgctgtttctcggctatgcggtgatgttctccgagctgatcctcgcacctgtaacaccgtccaacagcgcgcgtggtgcggggattatctatcccatcatccgtaacctgccaccgctctatcaaagtcaaccaaacgacagcagtagccgcagcattggcagctacatcatgtggatggggattgttgccgactgcgtgaccagcgccattttcttgacggcgatggcaccaaacttgctgttaattggactgatgaaaagcgcatctcacgccacgctgagttggggcgactggttcctcgggatgttgccgctcagcattttactggttctgctggttccctggctggcttacgtgctgtacccgccggtactgaagtctggcgatcaggtgccgcgctgggcagagacggaactgcaggcaatgggcccgctctgtagccgtgaaaaacggatgctggggctgatggtaggcgcgctggtgctgtggattttcggcggtgattatatcgatgccgcgatggtcggttacagcgtggtggcactgatgctgcttctgcgcattatcagttgggacgacattgtcagtaataaagcggcgtggaacgttttcttctggctggccagccttatcaccctcgccaccggactcaacaacaccggttttattagctggtttggcaaactgttagcaggcagcttaagcggttatagcccaacgatggtgatggtggcgttgattgtggtgttttatctactgcgctactttttcgccagcgccacggcgtatacctccgctctcgcaccgatgatgattgctgctgcgctggcgatgccggaaatcccgctgccggtgttctgcctgatggttggtgcggcaattggtctggggagcattcttacaccatacgccaccggccccagtccgatttactacggcagtggttatctgccaacggcggattactggcgactgggggcgatttttgggctgatattcctcgtattgctggtgattaccggcttactgtggatgcccgtggtgttgctttaagtgaggacggtgccggaaattgctctccggcacccaatagttttacgcagccggtaactccgccagcggccagcgcggacgcacgctaacgccgagatccgccgtcgcgcctgctttaaaccgcaccattccggcataggcgatcatcgcgccgttatcagtacaaaattccggacgcgcgtagaacacttcgccgcggcgttttttcatcatttcagccagcttcgcccgtaacgtacggttagcactcacgccgcccgccatgaccagtcgcttaaagcccgtctgacccagcgcccgcttgcacttaatcatcagcgtatcgaccaccgcatcttcaaaggcgcgggcgatatcagcacgcgtctggtcgtcggtgccgttgtcacgaatggtatttgccgcgaaggttttcaggccggagaagctgaaatccagccccggacggtcggtcatcggacgcgggaagacaaagcgcccggcagtaccctgagccgccattttgctcagtaacggcccgccaggataatccagccccagcagcttcgcggttttatcaaacgcttccccggcggcatcatcgatagactcgccgagcagctcgtactgaccaatgccagtcacgctgattaactgcgtatgaccgccggaaacaagcagcgcaacaaacggaaattccggcgggttatcttccagcatcggcgctaacagatgcccttccatatggtgtacagggatcgccggaacgtcccaggcaaacgccagagaacgccccacggtcgcgccaaccagtagcgcgccgactaatccagggcctgcggtataggccacagcatcaatgtcttttgccgttaaaccagactcctttagcgccgcctggatcaacggtacggttttacgcacatgatcgcgggaggccagttcaggcacgacgccgccgtagtcagcgtgcaatttcacctgactatacaattggttggctaacaaacctttttcatcgtcgtaaatggcgatgccggtttcatcgcaggaagtttcaatacccagtacacgcatgacttgttttacctcgctttattaccgcgcagtgtaggaccaatgcgggttgatgtaaaactttgttcgcccctggagaaagcctcgtgtatactcctcacccttataaaagtccctttcaaaaaaggccgcggtgctttacaaagcagcagcaattgcagtaaaattccgcaccattttgaaataagctggcgttgatgccagcggcaaaccgaattaatcaaaggtgagaggcacatgccggtaattaaagtacgtgaaaacgagccgttcgacgtagctctgcgtcgcttcaagcgttcctgcgaaaaagcaggtgttctggcggaagttcgtcgtcgtgagttctatgaaaaaccgactaccgaacgtaagcgcgctaaagcttctgcagtgaaacgtcacgcgaagaaactggctcgcgaaaacgcacgccgcactcgtctgtactaattccccgagagcgttgctctccgatcagaccgagttgtagttgtaaggccgtgcttccgaaaggaatgcgcggcttattttcgtttatgaattgctaaaaatcggggcctatggctggacgaatcccacgcgtattcattaatgatctgctggcacgcactgacatcgtcgatctgatcgatgcccgtgtgaagctgaaaaagcagggcaagaatttccacgcgtgttgtccattccacaacgagaaaaccccgtccttcaccgttaacggtgagaaacagttttaccactgctttggatgtggcgcgcacggcaacgcgatcgacttcctgatgaactacgacaagctcgagttcgtcgaaacggtcgaagagctggcagcaatgcacaatcttgaagtgccatttgaagcaggcagcggccccagccagatcgagcgccatcagaggcaaacgctttatcagttgatggacggtctgaatacgttttaccaacaatctttacaacaacctgttgccacgtctgcgcgccagtatctggaaaaacgcggattaagccacgaggttatcgctcgctttgcgattggttttgcgccccccggctgggacaacgtcctgaagcggtttggcggcaatccagaaaatcgccagagtttgattgatgcggggatgttggtcactaacgatcagggacgcagttacgatcgtttccgcgagcgggtgatgttccccattcgcgataaacgcggtcgggtgattggttttggcgggcgcgtgctgggcaacgatacccccaaatacctgaacagcccggaaacagacattttccataaaggccgccagctttacggtctttatgaagcgcagcaggataacgctgaacccaatcgtctgcttgtggtcgaaggctatatggacgtggtggcgctggcgcaatacggcattaattacgccgttgcgagcttaggtacgagtaccaccgccgatcacatacaactgttgttccgcgcgaccaacaatgtcatttgctgttatgacggcgaccgtgcaggccgcgatgccgcctggcgagcgctggaaacggcgctgccttacatgacagacggccgtcagctacgctttatgtttttgcctgatggcgaagaccctgacacgctagtacgaaaagaaggtaaagaagcgtttgaagcgcggatggagcaggcgatgccactctccgcatttctgtttaacagtctgatgccgcaagttgatctgagtacccctgacgggcgcgcacgtttgagtacgctggcactaccattgataagccaagtgccgggcgaaacgctgcgaatatatcttcgtcaggaattaggcaacaaattaggcatacttgatgacagccagcttgaacgattaatgccaaaagcggcagagagcggcgtttctcgccctgttccgcagctaaaacgcacgaccatgcgtatacttatagggttgctggtgcaaaatccagaattagcgacgttggtcccgccgcttgagaatctggatgaaaataagctccctggacttggcttattcagagaactggtcaacacttgtctctcccagccaggtctgaccaccgggcaacttttagagcactatcgtggtacaaataatgctgccacccttgaaaaactgagcatgtgggacgatatagcagataagaatattgctgagcaaaccttcaccgacagtctcaaccatatgtttgatagcctgcttgaactgcgccaggaagagttaatcgctcgtgagcgcacgcatggtttaagcaacgaagaacgcctggagctctggacattaaaccaggagctggcgaaaaagtgatttaacggcttaagtgccgaagagcgatcgggaagcccccgacagccgcactgagaggcagcggcaaatatataagtacgccctcgtaattatcgttggcggtaaacaaccgttggatttcagcgttaacggctgaaggacatcgggtcaatcgcccaacaccaacctcatgaaataagtgtggataccgtcttatggagcaaaacccgcagagtcagctgaaacttcttgtcacccgtggtaaggagcaaggctatctgacctatgccgaggtcaatgaccatctgccggaagatatcgtcgatagtgatcagatcgaagacatcatccaaatgatcaacgacatgggcattcaggtgatggaagaagcaccggatgccgatgatctgatgctggctgaaaacaccgcggacgaagatgctgccgaagccgccgcgcaggtgctttccagcgtggaatctgaaatcgggcgcacgactgacccggtacgcatgtacatgcgtgaaatgggcaccgttgaactgttgacccgcgaaggcgaaattgacatcgctaagcgtattgaagacgggatcaaccaggttcaatgctccgttgctgaatatccggaagcgatcacctatctgctggaacagtacgatcgtgttgaagcagaagaagcgcgtctgtccgatctgatcaccggctttgttgacccgaacgcagaagaagatctggcacctaccgccactcacgtcggttctgagctttcccaggaagatctggacgatgacgaagatgaagacgaagaagatggcgatgacgacagcgccgatgatgacaacagcatcgacccggaactggctcgcgaaaaatttgcggaactacgcgctcagtacgttgtaacgcgtgacaccatcaaagcgaaaggtcgcagtcacgctaccgctcaggaagagatcctgaaactgtctgaagtattcaaacagttccgcctggtgccgaagcagtttgactacctggtcaacagcatgcgcgtcatgatggaccgcgttcgtacgcaagaacgtctgatcatgaagctctgcgttgagcagtgcaaaatgccgaagaaaaacttcattaccctgtttaccggcaacgaaaccagcgatacctggttcaacgcggcaattgcgatgaacaagccgtggagcgaaaaactgcacgatgtctctgaagaagtgcatcgcgccctgcaaaaactgcagcagattgaagaagaaaccggcctgaccatcgagcaggttaaagatatcaaccgtcgtatgtccatcggtgaagcgaaagcccgccgtgcgaagaaagagatggttgaagcgaacttacgtctggttatttctatcgctaagaaatacaccaaccgtggcttgcagttccttgacctgattcaggaaggcaacatcggtctgatgaaagcggttgataaattcgaataccgccgtggttacaagttctccacctacgcaacctggtggatccgtcaggcgatcacccgctctatcgcggatcaggcgcgcaccatccgtattccggtgcatatgattgagaccatcaacaagctcaaccgtatttctcgccagatgctgcaagagatgggccgtgaaccgacgccggaagaactggctgaacgtatgctgatgccggaagacaagatccgcaaagtgctgaagatcgccaaagagccaatctccatggaaacgccgatcggtgatgatgaagatagccatctgggggatttcatcgaggataccaccctcgagctgccgctggattctgcgaccaccgaaagcctgcgtgcggcaacgcacgacgtgctggctggcctgaccgcgcgtgaagcaaaagttctgcgtatgcgtttcggtatcgatatgaacaccgactacacgctggaagaagtgggtaaacagttcgacgttacccgcgaacgtatccgtcagatcgaagcgaaggcgctgcgcaaactgcgtcacccgagccgttctgaagtgctgcgtagcttcctggacgattaatcggtaggccggatcaggcgttacgccgcacccggcactaggccctctgcacaaacgccaccttttcggtggcgttttttatcgcccacgcactaccagcgcctggtccagctcgcgatacgcttcaaccagtttctccagactaacgcgacttaaaccgctgggatttggcagcacccaaatctgcgtgctaccaatggtgagcgtttgtttcccccactgtgcaccgcgctggctgaatccctgttcatatgcttgtttgcccagaatcgccaacgcctgcggctgataatcttcaattttttcaatcagcttacgcccgcctgcgtgtagctcctgcttactaacttcattggcttgcaccgttggacggtctaccagtttggtgacgccacaacgataatccagcagatgctgtgcctcctgcggcttcaactgacggtcggtaaacccggcctgatatatcaccttccagaagcgatttgccggatgagcaaagggaaaaccagtcccggcggaactaagcccagggttgataccgcaaaacacgacccgtaaccctggagccaaaatatcctcaaccatatttactcctttctaacatcaccaggaaaagtataacggattgaaaatacattgtttataaaaacagcaggcgcgcggtaatggctggattgcgacacggagttactttataatccgctaccatggccccttagctcagtggttagagcaggcgactcataatcgcttggtcgctggttcaagtccagcaggggccaccagatatagcaaaggctgacgagaaatcgtcagcctttttctttttatatatcagttactttgcgtgccagtaagccgctgcacgtacccgctgtgggtcatactgttccgcttcaaagcggcggcttaaattcttaacgactttaccttcgccggttatccagatgaagtaatcatcggcagggatttgcatctgcgccagacgcgcatctaccgcctgctcatcatgtgccagccattcgatattaaaaccatcaaggtgcgcgagataatcctgacaggcgttatcccgcacgctaaccagcgcactaacttgcggtttaacggcaagtttgctcaacgtttccaggcggcggcgcaatgcaggcattccggattcatcgcagacatacagctgatacgcgtaatcttccggcaccaccaggctaccgcgcggacctgccaccgtaagtttatcgcccggttgcgcctgcatcgcccagccgctggcgaccccaccgtcgtgaataaagaaatcaatcgccagttcatggcgtagttcgtcatacagcggcgtatagtcacggctcggtgggcgtggtccttccggccagacgatgccctcttccgttaccgttggcggcacaaagtgagcgtcaggttgaggaaagaagagtttgctgtgatcgtcaaagccacggcttgtaaaaccgtccagcgcctcgccgccgaggacaatgcgctgaaaaccggcgctgatgcgctcaacgcgtaacacagtcagttcacggaagcgcagatcattgcgaacgcgctgcgggtagcggggggtgttattcattgttatcgccttcgtgatggtaatcagatatatctaaataaaactcgcaaatgataatgattgttaatcatgataaatgcaagcgatttgtagaactgatatgtctatagtctgataagacgaaccgcctcttctcaggcatcattactcaacgccggatgcggcgtgaacgccttatccggcctacgtgtgagatgagtccacgtttaaaaatcatttttacacttgcaagaacgctcatatcagatataaattagatatatctaattaagcaaaaggaggctgatatgagccatcatcacgaagggtgttgtaaacatgaaggccagccacgccatgagggctgctgcaaaggtgagaagagtgaacacgagcactgcggacacggtcaccagcatgaacacggtcaatgctgcggtggtcgccacggtcgcggcggcggtcgtcggcaacgtttctttggtcacggtgaattacgtctggtgattctggatattctcagccgcgatgacagccacggttacgaattgattaaagcgattgagaatctaacccaggggaattacaccccaagcccgggcgtcatctacccaacgctggattttctgcaggagcagagcctgattaccatccgcgaagaggaaggaggtaagaagcagattgcgctgaccgaacaaggcgcgcagtggctggaagaaaaccgcgaacaggtggagatgattgaagaacgcatcaaagcgcgttgcgttggcgcggcgctgcgccagaacccgcaaatgaagcgggcgctggataattttaaagcggtgctggatttacgcgtcaaccagagcgatatcagtgatgcacaaataaaaaagatcattgcggtgatcgaccgcgccgcttttgatattacgcaactggattaatcgccgcatccgccagtggcgcggtgcaattgccggatgcgacgcttgacgcgccttatccggcctacacccgctacacaccccgcaggcctgataagatgcgccagcatcgcatcaggcattgtgctccaaccgccggatccggcataccgattaatgcagtaccgtcaccgcgtcttccagtcggctggcgcggtgtttcaccatcgcgctcacctgcgcactctcttccaccagctcggcatttttctgggtgatcaggttaagctcatccactgcacgggtcaggctggaaagcccatcggcctgttccagcgtactatggctaatctgggcgatcaactgggtgacgtttttcacctgtgccacaatatcttccatcgtccgtccggcggcgtgtacctgctggctaccggattgcaccttatcagcactggcatcaatcagcttgcgaatatcgttggcagcattagcgctgcggctggctaaatgacgcacttcccctgccaccactgcaaaacctttgccctgttcgccggcacgcgccgcttccaccgccgcattcagggccagaatattggtctgaaacgcaatatcgttaatcaggctagtaatggtgccaatgcgctgggtactgtcggcgatatcgtccattgtcttgatcaccgtggtcatcgcctccccaccctgcactgccgcattactggcagtgatactcagtttatcggcagcgctcgccgtggcagagttctgtttcacgctcgccgccatttggttcatggtcgccaccgtttgctgaacgttatcaactgtctgctgggtatgttcgttcagttcatcggtgcctttcgccagcgtctcactgccatttctgacactggacacctggctactgacatcgttaattagccaacggcacatcaggccaagttgccctaccgcacgtaatgtcagccccagctcatcgctgcgattcagatgctcaacactattacgttctccggtcgccaccttcagtgcctgatgggcaacattttctatcgggcgcacaatctgccattcaaaacaggcgcttgccaacaataccactaacgcacagaggatatacgtcaccaccggggcagcaacaaaccaaagcatggccgccagcaagataaacatcagggtcatcactccacgcgcccgccagcgaagcggtaaactaggcagtttacccagccagcctttacgcaccaccaggcctttatgaatacgcttactggtacgtccggcgttcaacgctttgtacagcggctccaccgccgcgatctcttcatccgtcgcccgggtacgaatgctcatatagccactgatttttccctcgcgcaccatcggtaccgcattggcccgcacccaataatggtcaccatttttgcggcgatttttcacgatgccgctccagggctccccttttttcagggtgaaccacatatccgcaaacgccgcttttggcatatccgggtgacgcaccatgttgtgcggctgcccttgtaactcttgcaaggtatagccgctcacctgcacaaaagtgtcattagcatgagtgatatagctttgcagatcggtagtggacatcagagtggtatcgtccgccagcggggtattttgctgggtgacatacggatgagaagacatgttcgcgtcctgtgcaggttatatggttgttaacttcttgtcagagtttatgtcggccccgctgcggttatctttaaccgattaatttgatttagatcgcaatttgcgatttaaacacaaatctaattccttgatttaaaatactttcactctgttactatacgaaaacgttaattatcttgcccaaaaatcaggcaattattgccctgaaaacgtgcatttgcgcagcaatcatcaaatccatacccgacaaaaaccgtgcaaaataacaacaaatgttaacagatagcattaaatattgcacaaatgataaccgaatttgtgtttatcccgattttcgcgatcgcagccggagtggcgcaatccctgcaatacttaaatcggtatcatgtgatacgcgagcctccggagcatattttgaacaggttacctagcagcgcaagcgctttagcgtgcagcgcccacgccctgaatctcattgagaagcgaacgctggatcatgaggagatgaaagcacttaaccgagaggtgattgaatacttcaaagagcatgtcaatccggggtttttagagtatcgcaaatctgttaccgccggcggggattacggagccgtagagtggcaagcgggaagtttaaatacgcttgtcgacacccagggccaggagtttatcgactgcctgggaggttttggaattttcaacgtggggcaccgtaatccagttgtggtttccgccgtacagaatcaacttgcgaaacaaccgctgcacagccaggagctgctcgatccgttacgggcgatgttggcgaaaacccttgctgcgctaacgcccggtaaactgaaatacagcttcttctgtaatagcggcaccgagtccgttgaagcagcgctgaagctggcgaaagcttaccagagtccgcgcggcaagtttacttttattgccaccagcggcgcgttccacggtaaaagtcttggcgcgctgagcgccacggcgaaaagcaccttccgcaaaccgtttatgccgttactgccgggcttccgtcatgtgccgtttggcaatatcgaagccatgcgcacggctcttaacgagtgcaaaaaaaccggtgatgatgtggctgcggtgatcctcgaaccgattcagggtgaaggtggcgtaattctgccgccgccgggctatctcaccgccgtacgtaagctatgcgatgagttcggcgcactgatgatcctcgatgaagtacaaacgggcatggggcgcacgggcaagatgttcgcctgcgagcatgagaacgtacagccggatatcctctgccttgccaaagcgctcggcggcggcgtgatgccgattggcgcgaccatcgccactgaagaggtgtttagtgttctgttcgacaacccattcctgcataccaccacctttggcggcaacccgctggcctgtgcggcggcgctggcgaccatcaatgtgttgctggagcagaacttaccggctcaggctgagcaaaaaggcgatatgttgctggacggtttccgtcaactggcgcgggaatatcccgatctggtacaggaagcgcgtggtaaagggatgttgatggcgattgagtttgttgataacgaaatcggctataactttgccagcgagatgttccgccagcgcgtactggtggccggaacgctcaataacgccaaaacgatccgcattgaaccgccactgacactgaccattgaacagtgtgaactggtgatcaaagcggcgcgtaaggcgctggcggccatgcgagtaagtgtcgaagaagcgtaatatcaaatcggatggcgatacgacgtcgccatccgatctttttatacgacgcgtacgcccgcaggcatcatccgctccggcgttaacagcacgctttcactgccgtcatcggtttccgcacacaacagcatgcattcgctcgtttcaccacgcattttcgctttttgcagattgcataagaccaccaccgttttccccatcagctcttcttcgctgtagtacggcaccaggctggtcacggtttgcagcgttttttgccccacatcaacctgtacgatgtacagcttgtcggcgttttcatggcgtttcacttccacaatctttccgacgcgcatttccagacgtgcaaaatcagcgtaagccacggtttccattgcttcctcccttagggtaaaattttactaaactatagcaaaagtttttctcaatcctgtaggctaaaaatggagaatgcaggcgtgatcacattcgtgagccgctgtgttaccgttacagcgtcaaagaaacgcgctttatttactgaaaacaggtgacccgataagcacttcctctacaatgggggcgcacatcagggaaagtaaaaaaggtaaacatggcaacactaaaagacatcgcaatcgaagctggcgtatccctggcgacagtatccagggtcttaaatgacgatccgacattgaatgtgaaagaagagacgaaacatcgcattctcgagatcgccgaaaagctggagtacaagaccagtagtgcccgtaaactccagacaggtgcagtcaaccaacaccatattctggctatctacagctaccagcaggagctggagatcaacgatccttactatctggcgatccgccacggcattgaaacccagtgcgaaaagctgggcatcgagctcaccaactgttatgaacacagcggcttaccagacattaaaaacgtcaccggtattttaattgtcggcaaacccacgcccgccctgcgcgccgctgccagcgcgttgaccgacaatatctgttttatcgactttcacgaacccggcagcggttacgatgcggtggatatcgatctggcacgcatcagtaaagaaatcatcgacttctatatcaaccagggcgttaatcgtattggttttattggcggtgaagatgagcctggcaaggcggatattcgtgaggtcgcctttgcggaatatggccgactgaaacaagtggtacgcgaagaggatatctggcgcggcggtttttccagtagcagcggttatgaactggcaaaacaaatgctggcgcgggaagactatccgaaggcactgtttgttgcttccgattccattgctatcggcgtactgcgggcaattcatgaacgaggcctgaacatcccacaggatattagccttatcagcgttaacgatatccccaccgcgcgatttacctttccgccgctctccaccgtgcgcatccattccgagatgatgggaagtcagggcgttaacctggtgtatgaaaaagcccgcgatggtcgcgcgctgccgctgttagtcttcgttcccagcaaattaaaactgcgcggcacgacccgttaaatccccttacacactgtccggcaatcgtttttgccggacagtgctgccgtttattttcgtgatccagttaaagtaaatgcatttacctgctactttttagtaaaaattttactaaactccccagcaattacacaaactaccatcaccatgaatggttccgatttctctctaccgggaggccctatgaatcgctgggaaaacattcagctcacccacgaaaaccgacttgcgccgcgtgcgtacttttttagttatgattctgttgcgcaagcgcgtacctttgcccgcgaaaccagcagcctgtttctgcccttaagcggtcagtggaatttccacttttttgaccatccgctgcaagtaccagaagccttcacctctgagttaatggctgactgggggcatattaccgtccccgccatgtggcaaatggaaggtcacggcaaactgcaatataccgacgaaggttttccgttccccatcgatgtgccgtttgtccccagcgataacccaaccggtgcctatcaacgtattttcaccctcagcgacggctggcagggtaaacagacgctgattaaatttgacggcgtcgaaacctattttgaagtctatgttaacggtcagtatgtgggtttcagcaagggcagtcgcctgaccgcagagtttgacatcagcgcgatggttaaaaccggcgacaacctgttgtgtgtgcgcgtgatgcagtgggcggactctacctacgtggaagaccaggatatgtggtggagtgcggggatcttccgcgatgtttatctggtcggaaaacacctaacgcatattaacgatttcactgtgcgtaccgactttgacgaagcctattgcgatgccacgctttcctgcgaagtggtgctggaaaatctcgccgcctcccctgtcgtcacgacgctggaatataccctgtttgatggcgaacgcgtggtgcacagcagcgccattgatcatttggcaattgaaaaactgaccagcgccagctttgcttttactgtcgaacagccgcagcaatggagtgcagaatccccttatctttaccatctggtcatgacgctgaaagacgccaacggcaacgttctggaagtggtgccacaacgcgttggcttccgtgatatcaaagtgcgcgacggtctgttctggatcaataaccgttatgtgatgctgcacggcgtcaaccgtcacgacaacgatcatcgcaaaggccgcgccgttggaatggatcgcgtcgagaaagatctccagttgatgaagcagcacaatatcaactccgtgcgtaccgctcactacccgaacgatccgcgtttttacgaactgtgtgatatctacggcctgtttgtgatggcggaaaccgacgtcgaaagccacggctttgctaatgtcggcgatattagccgtattaccgacgatccgcagtgggaaaaagtctacgtcgagcgcattgttcgccatatccacgcgcagaaaaaccatccgagcatcatcatctggagcctgggcaatgaatccggctatggctgtaacatccgcgcgatgtaccatgcggcgaaagcgctggatgacacgcgactggtgcattacgaagaagatcgcgatgctgaagtggtcgatattatttccaccatgtacacccgcgtgccgctgatgaatgagtttggtgaatacccgcatccgaagccgcgcatcatctgtgaatatgctcatgcgatggggaacggaccgggcgggctgacggagtaccagaacgtcttctataagcacgattgcattcagggtcattatgtctgggagtggtgcgaccacgggatccaggcacaggacgaccacggcaatgtctggtataaattcggcggcgactacggcgactatcccaacaactataacttctgtcttgatggtttgatctattccgatcagacgccgggaccgggcctgaaagagtacaaacaggttatcgcgccggtaaaaatccacgcgcgggatctgactcgcggcgagttgaaagtcgaaaataaactgtggtttaccacgcttgatgactacaccctgcacgcagaggtgcgcgccgaaggtgaaacgctcgcgacgcagcagattaaactgcgcgacgttgcgccgaacagcgaagcccccttgcagatcacgctgccgcagctggacgcccgcgaagcgttcctcaacattacggtgaccaaagattcccgcacccgctacagcgaagccggacaccctatcgccacttatcagttcccgctgaaggaaaacaccgcgcagccagtgcctttcgcaccaaataatgcgcgtccgctgacgctggaagacgatcgtttgagctgcaccgttcgcggctacaacttcgcgatcaccttcagtaaaatgagtggcaaaccgacatcctggcaggtgaatggcgaaagcctgctgactcgcgagccaaagatcaacttcttcaagccgatgatcgacaaccacaagcaggagtacgaagggctgtggcaaccgaatcatttgcagatcatgcaggaacatctgcgcgactttgccgtagaacagagcgatggtgaagtgctgatcatcagccgcacagttattgccccgccggtgtttgacttcgggatgcgctgcacctacatctggcgcatcgctgccgatggccaggttaacgtggcgctttccggcgagcgttacggcgactatccgcacatcattccgtgcatcggtttcaccatgggaattaacggcgaatacgatcaggtggcgtattacggtcgtggaccgggcgaaaactacgccgacagccagcaggctaacatcatcgatatctggcgcagcaccgtcgatgccatgttcgagaactatcccttcccgcagaacaacggtaaccgtcagcatgtccgctggacggcactgactaaccgccacggtaacggtctgctggtggttccgcagcgcccaattaacttcagcgcctggcactatacccaggaaaacatccacgctgcccagcactgtaacgagctgcagcgcagtgatgacatcaccctgaacctcgatcaccagctgcttggcctcggctccaactcctggggcagcgaggtgctggactcctggcgcgtctggttccgtgacttcagctacggctttacgttgctgccggtttctggcggagaagctaccgcgcaaagcctggcgagctatgagttcggcgcagggttcttttccacgaatttgcacagcgagaataagcaatgaggatcatcgataacttagaacagttccgccagatttacgcctctggcaagaagtggcaacgctgcgttgaagcgattgaaaatatcgacaacattcagcctggcgtcgcccactccatcggtgacagtttgacttaccgcgtggagacagactccgcgaccgatgcgctatttaccgggcatcgacgctattttgaagtgcattactacctgcaagggcagcaaaaaattgaatatgcgccgaaagagacattacaggtagtggaatattatcgtgatgaaactgaccgtgaatatttaaaaggctgcggagaaaccgttgaggtccacgaagggcaaatcgttatttgcgatatccatgaagcgtatcggtttatctgcaataacgcggtcaaaaaagtggttctcaaagtcaccatcgaagatggttatttccataacaaataacaactacggcggcaaaaggagtttgccgccaccgctaccctactcattttcggagatgtgttatgtctgataccaaacgtaatacaatcggcaaattcggcttgctcagcctgacttttgccgccgtttacagctttaacaacgttatcaataataatattgagcttggactggccagcgcaccgatgtttttcctcgcgacgattttttattttattcccttctgtctgatcatcgcagaatttgttagcttaaataaaaacagtgaagccggtgtctacgcgtgggtaaaaagtagcctgggcggacgttgggcatttattactgcctatacctactggttcgtaaacctgttctttttcaccagtctgttgccgcgcgttattgcttatgctagctatgccttcctcggatacgaatatattatgacgccggttgccaccaccattatcagtatggtgctgttcgccttctccacctgggtttccaccaacggggcgaaaatgttggggccaattacctccgtcactagtacgctgatgctgctgttaacgctctcctacattttactggcaggtacggcgctggttggcggcgtacagcctgctgacgccatcaccgttgacgcgatgatcccgaacttcaactgggcgttcctcggcgttaccacctggatctttatggccgcaggtggcgcggagtccgtcgctgtgtacgttaacgacgtcaaaggcggtagcaaaagcttcgttaaagtgatcatcctcgccgggatttttatcggcgtactgtattccgtctccagcgtgctgattaacgtcttcgtcagcagcaaagagttgaaatttaccggcggaagcgtgcaggtattccacggcatggcggcgtattttggtctaccggaagcgttgatgaatcgctttgtcggtctggtgtcctttaccgcgatgttcggttccctgctgatgtggaccgcaacgccggtgaaaattttcttctccgaaatcccggaaggcatctttggtaagaaaaccgtcgaactgaacgaaaacggcgttccggcgcgcgcagcgtggatccagttcctgatcgtcatcccgctgatgattatcccgatgctcggttccaataccgtgcaggatctgatgaatactattattaatatgaccgccgcagcgtccatgcttccgccgttattcatcatgctggcttacctgaatttacgcgccaaattagatcacctgccacgcgatttccgtatgggctcccgccgcaccggtattatcgttgttagtatgctgattgcgatatttgccgtagggtttgtcgctagcacattcccgactggcgcgaatattctgaccatcattttttataacgtcggcggtattgttatcttccttggctttgcgtggtggaaatacagtaaatatataaagggattaacggctgaagagcgccatattgaagcgacgccagccagcaatgttgattaagcagaataataaaaaatgagcaggcattttccctcttcctggatgaggagagggaaaatagtttctgcctttatatttttataattacaacgataaaaggctgtactttttctttagctcatggattaacacaatgaaattaatcactgcaccatgcagagcattacttgctctgccgttttgctacgccttttctgcggcaggagaagaagcacgtccggcagaacatgacgacacaaaaacacccgcaattaccagcacatcttctcctagttttcgtttttacggcgaattaggggttggtggatatatggatttagagggtgagaataaacataaatacagcgacggtacctatattgaaggtggcctggagatgaagtacggctcctggttcggcctgatttacggcgaaggctggaccgtgcaggccgaccacgacggcaatgcctgggtgccagaccatagctggggtggtttcgagggcggaattaaccgtttctatggcggttatcgtaccaatgatggcaccgaaatcatgctcagtctgcgtcaggattccagcctggatgacctgcaatggtggggcgatttcacccccgatctgggctacgtcattcccaatacccgcgacattatgactgcgctgaaggtacagaacttaagcggcaactttcgttatagcgtcaccgcgactcctgccggacatcatgatgaaagcaaagcctggctacattttggcaaatacgatcgctatgacgacaaatacacctatccggcaatgatgaacggttacatccagtatgaccttgccgaaggcatcacctggatgaacggtctggaaatcaccgacggcacaggacagctctatctcacgggcctgctaactcctaactttgccgctcgcgcctggcaccataccggacgcgccgacgggctggacgtaccgggaagtgaaagtgggatgatggtgagcgccatgtatgaagcgttaaagggcgtttatctctccaccgcttacacctacgccaaacatcgccctgaccacgctgacgatgaaaccacctctttcatgcagtttggtatctggtacgaatacggcggcggacgtttcgccacggcttttgatagccgcttctacatgaaaaatgcctctcacgatcccagcgaccaaatcttcctgatgcaatatttctactggtaataaggactgtaatttcatgaaaataaaaactattttaacgccagtaacctgcgctctgctgataagtttttccgcccatgccgctaacgccgacaattataaaaacgtgattaaccgtactggcgcgccgcagtacatgaaggattacgattacgacgatcaccagcgttttaatccgtttttcgatctcggagcctggcatggtcatctgttgccagacggccctaacaccatgggcggctttccgggcgttgcgctgctgacggaagagtacatcaactttatggccagcaatttcgaccgcctgaccgtctggcaggacggcaagaaagtcgactttacgctggaggcatacagtattcccggtgcgctggtgcaaaaactgacagcaaaagatgtgcaagtcgaaatgactctgcgcttcgccacgccgcgcacgagtctactggaaaccaaaatcaccagcaataaaccgctggatctggtgtgggacggcgaactgctggaaaaactggaagcgaaagaagggaaaccgctttccgataaaaccattgctggcgaatgccctgactatcagcgcaaaatcagcgccacccgtgatggcctgaaagtcacctttggcaaagtgcgcgccacctgggatctgctgacctccggcgaaagcgaatatcaggtgcataaatccctgccggtgcagactgaaatcaacggtaatcgctttaccagtaaggcgcatatcaacggtagcaccacgctctacaccacctattcccatctgctgaccgctcaggaagttagcaaagagcaaatgcagatccgcgatattctggcgcgtccggcgttttatctcaccgccagccagcaacgctgggaagaatacctgaagaaagggttaaccaatccggatgcgacgccggaacagacgcgcgtcgcggtgaaagcgatcgaaacgctcaacggtaactggcgcagtccgggcggtgcggtgaaatttaacaccgttacaccgagcgtgaccgggcgctggttctccggcaatcagacctggccgtgggatacctggaagcaggcgtttgcgatggcgcatttcaatccggacatcgccaaagagaatatccgcgcggtcttctcctggcagatccagcctggcgatagcgtgcgtccgcaggatgtgggctttgtccccgacctgatagcgtggaaccttagccccgagcgtggtggcgatggcggcaactggaacgaacgtaataccaaacccagccttgccgcctggagcgtgatggaagtgtataacgtcacccaagataaaacctgggtggcagagatgtacccgaaactggtggcctatcacgactggtggttacgtaaccgcgatcacaacggcaacggcgtgccggaatatggcgcgacccgcgacaaagcccacaacactgagagcggcgagatgctgtttacggtgaaaaaaggcgataaagaagagacgcagtctgggctgaacaactacgcccgcgtggtggagaaaggccagtacgacagtctggaaattccggcacaggttgctgcaagctgggaaagcgggcgtgatgatgccgccgtctttgggtttatcgacaaagaacagttggataaatatgtcgctaatggcggcaaacgtagcgactggacggtgaaattcgccgaaaaccgcagtcaggacggaacgttgctgggctacagcctattgcaggagagcgtggatcaggccagctatatgtacagcgataaccattatctggcggagatggcaaccatcctcggtaagccagaagaggccaaacgctatcgccagttggcacagcagctcgcggactacatcaacacctgtatgttcgacccgactacccagttctactatgacgtacgtattgaagataaaccactggcgaacggctgcgcgggcaaaccgattgttgagcgcggtaaagggccggaaggctggagcccgctgtttaacggtgcggcaacgcaggccaatgccgacgcggtggtgaaggtgatgctcgatcctaaagagttcaacacctttgtcccgctgggaacggcggcgttaaccaatccggcttttggcgctgatatctactggcgtgggcgcgtatgggtggatcagttctggtttggtctgaaagggatggagcgttacggttatcgtgatgatgccctgaagctggcggatacgttcttccggcacgccaaagggttaaccgccgatggaccaattcaggaaaattacaacccgctgacaggcgcacagcaaggcgcaccaaatttctcctggagtgccgcgcatttgtatatgttgtataacgattttttccgtaagcaataatttgcaactgctggcggatgcggcgtaaacgccttatccgccctacatgtgcaatcctcctggccggataaaacgcggcaagcgttgcatccggcaactgcaccgcgccactggcggatgcggcgtgaacgccttatccgccctacatgtgtgttcccgtaggtcggataagacgcgacaagcgtcgcatccggcatctgcaccgcgccactggcggatgcggcgtggacgccttatccgccctacatgtgcaattccgtaacctggataaaacgcgacaagcgtcgcatccggcgttatcaccgggcgtattctttttgaatcccatcacaaaccccgcactccccttttcccttttctccggcgacggctaaattagaactcatccgaccacataacaattattttacatactggacaattttatgagctacccgagcctgttcgccccgctggatttaggttttaccacgttaaaaaaccgcgtgttgatgggcagtatgcacaccgggctggaggaatacccggacggtgccgagcggctggcagcgttttatgccgaacgcgcccgtcacggcgtggcgctgattgtcagcggcggcattgcaccagatttaacaggcgttggcatggaaggtggcgcaatgctcaacgacgccagccagatcccacaccatcgcaccattaccgaagcggtacatcaggaaggcggcaaaatagccctgcaaattttgcataccgggcgctacagctaccaaccgcatctggtcgccccgtccgcattgcaggcccccatcaaccgtttcgtgccccatgagttaagccatgaagagatcctgcaactgatcgacaatttcgcccgctgcgcgcaactggcgcgggaggcaggatacgacggtgtagaggtgatgggttccgaagggtatttgatcaacgaatttctgacgctgcgcaccaatcagcgtagtgaccagtggggcggcgattaccgcaaccggatgcgatttgccgtagaagtagtgcgtgcggtgcgcgaacgcgtcggcaacgacttcattattatctaccgactgagcatgctcgacctggtcgaagacggcgggacttttgccgaaacggtagagctggcgcaggccattgaagcggcgggcgcgaccattatcaacaccggcattggctggcatgaagcacgtattccgaccattgccacgcccgtgccgcgcggcgcatttagctgggtcacgcgcaaactgaaaggccacgtcagcctgccgctggtaaccaccaaccggattaacgatccgcaggttgccgacgatattctcagccgcggcgatgccgatatggtaagcatggcgcgaccgtttcttgctgatgcggagctgctgagtaaagcgcaaagcggacgagccgatgagatcaacacttgtattggctgcaatcaggcctgtctcgatcaaatcttcgttggcaaagtcaccagctgcctggtgaatcctcgcgcctgccacgaaaccaaaatgccaatccttcccgccgtgcagaaaaaaaatctggcggtggtcggtgcgggacctgctgggctggcgtttgccattaacgcggcggcgcgtgggcatcaggtaacattgtttgacgctcatagcgagattggcgggcagtttaatatcgccaaacagatccccggcaaagaggagttttacgaaacgctgcgctattaccgccggatgatcgaagtgacgggcgtgacgctaaaactcaatcacaccgtgacggcggatcagttacaggctttcgatgaaacgatcctcgccagtgggatcgtgccgcgcactccgcccatcgacgggatcgatcatccgaaggtattgagttatctcgatgtactgcgcgacaaagcgccggttggcaacaaagttgccatcatcggttgtggcgggattggttttgatacggcgatgtatttaagtcagccgggcgaatccaccagccagaatatcgccgggttctgtaatgaatgggggatcgacagtagcctacaacaggctggtggcttaagcccgcagggaatgcagatcccccgtagcccacggcagattgtgatgctccagcgcaaagccagcaaaccaggacaggggttaggcaaaaccaccggctggatccatcgcaccaccctgctcagccggggtgtgaaaatgatcccaggcgtaagttatcagaagattgacgatgacgggctgcatgtggtgatcaacggcgaaacgcaggtattagcagtggacaatgtggtgatctgcgcagggcaagagccaaaccgcgcgctggcgcaaccgctgattgatagcgggaaaacggtgcatttaattggcggctgcgatgtggctatggagctggacgcacgacgggcaattgcccagggaacacggctggcgctggagatttaaatcgttatttgaagcgccggatgcaacgcatccggcacgtcgcgttaatcaataaacaaggcgggagaaatgccgaatcgcgttgccaattttttagcgtgttccagcgttaatttcctcttcccgctcaaaacgcgactcaccatagatttactgccaatttccggcagatcggaaagggttaaaccatattgatccataagggtacgaatcacggctataccgccaggcatggcttgagccatggcattaaattccgcaaattcgggcgcactttcttcccacgcggttattttggcacacaccagatccagcaaggggttttcaggatcgttgagcagcagatgatctaccagttccagcgcctgggtgtattgttcctcgttctgaatacccgccagaaaaggtgccacagcagttagcttttctcctgcttgcaagatgtcggcaatcgcaatcattttttccccttagtacgatgaacagcggtaaagaaatcgtattctttatgcgtcataacttcacgtatgtagcacttttggctttcaaaaaagaccattgctacaacacgtaattcattgcccccaacattgaaaacataatgcttatccagatatttgaagttatccagagatgggaatactgcttttaaactctcaggttttttgaaatatcccttagcaatcgtgttccccagagccaccaactccgttttatgttgcgggtatttttccgcagcatctttcaatgctttttgagttatcaggtgcattcttcatcacgtccgttgacaaattggcaatatgataacatccgttgccagattggcaacggatgaatttatctgtgtgacggaagaataaacgtagaaaaacgctaaacaagagaatgtagacgatggtgacagggattttttgttttatggaagcgcgattccagaactgggcagacattgccggatgcgacgcttgccgcgtcttatccggcctggagtaacgtgctgaacgtaggccggataaggcgtttacgccgcatccggcaggtaactcccaatcttaccgacgacgtcccagcttcaccgctttcagtaccacaaatttattattcgtcgcaatagtggtgcagttgccgaaaatcttcttcagtttatggaagtaatccaggtgacggttggcaacgatatacagctcgccgttgattttcaggcagcggcgggcgtggtggaacatctcccaggcgacgttatcggtcagcgcatgttgttggtgaaacggcgggttgcagagcacagcattaaagcggaaaggctccacgccggagagcgcgttgttgatcataaactcgcagcgatccaacgcctctggcatgttggtttcaacgttcaaacggctggaagcaaccgccatcgggctttcatcgacaaacaccactttcgcctgcgggtttttatcaagcagcgtcagaccaataacgccattaccgcaaccgagatcgacaatctccccttcgagattctctggcagatgttgcataaagaagcgcgcgccgatatcaagcccggtgcgggagaagacattcgcatggttgtggatagtccagtcagtaccttccagcttccagctaacggtctgcggcgcatcggccagctgcggttcattgaaagtgcaattaatcaggcgcgcttttttccatgccagcgtggtggtggttgggccgagcactttttcgaacagttccagcgtggaagtgtgaatgtcacgggccttggcaccggcaataatacgtgtatcgctcgtgaccactttgcgcagcgcacgcagttgctgttccagcaatgccagtgttttcggcactttgatcagcaccacacccggctgttgcgggtagtcggcggtgctgtcgagaaacttcacgctgctctcatcaatcccgttgaggcgtaaattctcgcgcgtcgccagttcactgatgtaactgtcgccaatgctgtacggcttatgttccgccagtgcgcagcttaacgcaccaaaggcatcattcaggatcaacaccgggccgcggatttctgtgtcgtccaactgttgcagcaaatattcatccgccgcttcccacgcctgtagcgggttaacgtcatccgtcgccggaaaacgttgtagtgtcagactacggaaaccgttgtctaagtggctcatcggccctcctgaatgataaaatttcgacattgcccctgaaaagggtgcgtgagtataccctttttctctttttcgtgggcggttatgagcaatcttacttatcttcagggttatcccgagcagctactttcccaggtgcgaacactgattaacgaacagcgtctgggcgatgtgctggcaaaacgctatccgggaacacacgactacgccaccgataaagccctctggcaatatactcaggatctgaaaaatcagtttctgcgtaatgccccgccgatcaataaagtgatgtatgacaataagatccatgtgctaaaaaacgcgctcgggttacataccgctgtttctcgtgtgcagggcggcaagctgaaagcaaaggtggagatccgcgtcgctaccgtgtttcgcaacgcgccggaaccgtttttgcgcatgatcgtggtgcacgagctggcgcacctgaaggagaaagagcataacaaagcgttttaccagttgtgttgtcatatggaaccccagtaccaccagcttgagttcgacacccgactgtggctaacgcagttgagccttgggcagaacaaaatctgaaaatgatgtcaggcgttatcttttctttctttagcgcctaaaatcgacctcccccctttcgttaaggataacgaccatgctgcgcgcatttgcccgccttcttctccgtatttgtttttctcgccggactctaaagattgcctgcttactgttacttgtggcaggagcgaccatccttatcgccgatcgcgtaatggtcaacgccagcaaacagctgacctggagcgatgtcaacgccgttccggcgcgtaacgtgggtttattgctgggggcgaggccgggtaatcgctactttacccgacgtattgataccgcagcagcgttgtaccacgccggaaaagtgaaatggctgctggtaagtggcgataacggacgtaaaaattacgatgaagcaagtggtatgcagcaggctttgatcgctaaaggcgtaccagcaaaagtgatcttctgcgactatgccggattcagtacgctggatagcgtagtgcgtgccaaaaaggtttttggtgaaaaccatatcaccattatcagccaagaatttcataatcaacgcgccatctggctggcaaaacagtacggcatcgacgctatcggttttaacgcgccagacctcaatatgaagcacggtttttatactcaactgcgggagaaactcgctcgtgtcagcgccgtgattgacgccaaaatcctccatcgccagccgaaatatctcgggcctagcgtcatgattgggccgtttagtgagcatggctgtccggcgcagaaataatgcgtatctgcgcacgtcgaagatgaaaaaggcgtgctacattgacgacagaatccctttatggagtatccacgcgttatgatacgtttcgctgtgattggtacgaactggatcactcgccagttcgtcgaggccgcccatgagagcggtaaatacaagttaaccgccgtatattcccgcagccttgaacaggcccagcacttcgccaatgatttttctgtcgagcatctgtttaccagcctggaagcgatggcggaaagcgatgccattgacgcggtgtatattgccagcccgaattccctgcatttttcccagacacaacttttccttagccataaaattaatgtgatttgcgagaaaccgctggcgagcaatctggcggaagtggatgccgccattgcctgtgcgcgggaaaatcaggtggtgctgtttgaggcatttaaaaccgcctgcctgccgaactttcatttgttgcgccaggcgctgccgaaagtcggcaaactgcggaaagtctttttcaactattgccagtattccagccggtatcaacgttacctggatggtgagaatcccaacacctttaatccggcattctctaacggtagtattatggatatcggtttttactgtctggcgagcgcggtggcgttatttggtgagccgaaaagcgtgcaggcaaccgccagtttgctggcaagcggcgttgacgcccagggcgtggtggtgatggattacggtgatttcagcgtcaccttgcagcacagtaaagtcagtgattctgtcctggcgagcgagattcagggcgaagcaggaagcctggtgattgaaaaactgtctgaatgccagaaagtgtgcttcgtgccgcgtggcagccaaatgcaggatctcacccagccgcagcatattaataccatgctctacgaagcagagctgttcgctaccctggtggatgagcatctggtggatcatccagggctggcggtcagtcgcatcaccgccaaactgctgaccgagatccgccgccagactggggtgatttttccggcagatagcgtaaaactataattgccaaagtaaaacagtgtaaaaggtatgtaacagaccattgactggctgaatggtctgtcatactttgttacctgcaaaggggagtaacttcattgccggtcgatcgtcattacgatgtgtgaaaaaacacatccggtcaccgggcaacccgaaaggaatacgcagacgtattccttttttgttgtaagtgagaccttgccggaaggcgaggtctatgcataaaaagcagcggctgacgtcttccgacgttggccgtttttttatgtgtaaggaacttctatgaatactgtcggcacgccgttgctatggggcggattcgctgttgttgtcgccattatgctggctatcgacctgttgttgcaggggcgtcgtggggcacatgccatgaccatgaaacaggctgcggcctggagcctggtctgggtgacgctgagcttactgtttaacgccgctttctggtggtatctggtgcaaaccgaaggtcgcgccgttgccgatccacaggcactggcctttctcacaggttatctgattgagaaaagcctggcggtcgataacgtctttgtctggctgatgttgttcagctatttctctgttccggcggcattacaacgccgcgtgctggtgtatggcgtgctcggggcgattgttctgcgtaccatcatgatcttcactggcagctggctaattagccagttcgactggatcctgtatatcttcggtgccttcctgctgtttaccggcgtgaagatggcgctcgcccatgaagatgaaagtggcattggcgacaagccgctggtgcgctggctacgcggtcatttgcgcatgaccgacaccatcgacaacgagcatttctttgtgcgtaagaatggattgctgtacgccacaccgctgatgctggtactgattctggtggaattgagcgacgtgattttcgccgtggatagcattccggctatcttcgccgtgaccactgacccgttcattgtgctgaccagtaacctgtttgcgatcctcggcctgcgtgcgatgtatttcctgctggcgggcgtagcagagcgtttcagcatgctcaaatatggcctggcggtgattctggtgtttatcggtatcaagatgctgattgtcgacttctaccatattccaatcgccgtcagcctgggcgtggtgtttggcattctggtgatgacgtttattatcaacgcctgggtgaattatcggcatgataagcagcggggtggataatttttaatctgcctaagccgtgtaccctgtcattaacatgagcaccgttttctccctctcccttccagggagagggtcggggtgagggtaatttttcgcaccgatgctggcctgttcccctcaccctaaccctctccccaaacggggcgaggggactgaccgagtccttttttgatgttgtcatcagtctggaagccgcacgttggctttatttttatgtcaaagaaatgtaaccattaagtttcaaaatatgacctctctttaaaatccagcatttttcgcttcccgaagctgtaactttccttatactcgaccttgcaaacactttgttacatcctgaaagatgcgtcgacagaacgcaccagggatgtgcgacaacacaatgaaaggatcgaaaaatgactacgcaacgtagtccggggctattccggcgtctggctcatggcagcctggtaaaacaaatcctggtcggccttgttctggggattcttctggcatggatcagtaaacccgcggcggaagctgttggtctgttaggtactttgttcgtcggcgcactgaaagccgttgcccccatcctggtgttgatgctggtgatggcatctattgctaaccaccagcacgggcagaaaaccaatatccgccctattttgttcctctatctactgggcaccttctctgctgctctggccgcagtagtcttcagctttgccttcccttctaccctgcatttatccagtagcgcgggtgatattagcccgccgagtggcattgtcgaagtgatgcgcgggctggtaatgagcatggtttccaaccccatcgacgcgctgctgaaaggtaactacatcgggattctggtgtgggcgatcggcctcggcttcgcactgcgtcacggtaacgagaccaccaaaaacctggttaacgatatgagcaatgccgttacctttatggtgaaactggtcattcgcttcgcaccgattggtatttttgggctggtttcttctaccctggcaaccaccggtttctccacactgtggggctacgcgcaactgctggtcgtgctggttggctgtatgttactggtggcgctggtggttaacccattgctggtgtggtggaaaattcgtcgtaacccgttcccgctggtgctgctgtgcctgcgcgaaagcggtgtgtatgccttcttcacccgcagctctgcagcgaacattccggtgaatatggcgctgtgtgaaaagctgaatctggatcgcgatacctattccgtttctattccgctgggagccaccatcaatatggcgggcgcagcaatcactattaccgtgttgacgctggctgcggttaatacgctgggtattccggtcgatctgcccacggcgctgctgttgagcgtggtggcttctctgtgtgcctgtggcgcatccggcgtggcgggggggtctctgctgctgatcccactggcctgtaatatgttcggtattagcaacgatatcgccatgcaggtggttgccgtcggctttatcatcggcgtattgcaggactcttgcgaaaccgcgctgaactctagtactgacgtgctgttcactgcggcagcttgccaggcagaagacgatcgtctggcaaatagcgccctgcgtaattaattgtttaacccctttcgtctacggcggaaggggttttctcaactttaaacggatcaattccccttttctgcatccgccagaaacgaatgatattcaggccattcataagcagaaaactaccctcaatcatcgtgccgcctatgctccccgcccagaagttgtgaatcacccagcaacacgtactaaaccacattacgcagcgcatggtcagccctttacagcagaatagcgcccaggtactgacaatcgtgccgataaccggcaatagttcgacaggatgatggaacttcgcgaggccaattccgccagtcagcacaataaaaatcgccattacccataagctgcgcgtgcgtaaggtaatcaatgtacgaatggcattaaggatggcactggcaccagcgggataggtgcccagaagaaaaaaatgtacgccaataacggcgctatagacgctaagctgctttttgaagcgacgttcgtcacgattgaaaaatgttgtgataccaatcagaaaggcgatgacacccacgccctgggccagccaatacgcggtcatgataaatccttagcaggtatggaaaagcaaacggcgcttcacattatgaaacgccgttttttattaacaactcatttcgactttatagcgttacgccgcttttgaagatcgccagttcgcggaagtcgttacgctcgttacaggtttgcttaccgttggcaaactcaacgatggtgtcgataaattcttccagcaactgcggcatcgctttaccgtggatcaactgacccgcgtcaaagtcgatccagtgttttttcttcgccgccagttcactgttggtggcgattttcaccgtcggcacaaatccaccatacggcgtgccacgaccagtactgaacagcaccatatggcagcccgcacccgccagggcgctggtcgctacggcatcgttacccggcgcacttaacaagttcagccctggcgttttcagacgctcgccgtaacgcagcacgtcaaccacgacgctggaacccgctttctgggtacagccaagacttttgtcttccagcgtggtgataccgcccgctttgttccccgggcttgggttttcatagatcggctgatcatgggcaataaagtactgtttgaagtcgttgaccatggtgaccagtttttcaaacgttgcttcgtcgcggcaatggtccatcagcaactgctctgcgccaaacatctccggcacttcggtcagtacggtagtaccgccgttagcaatcacgtagtcagagaaacgccccagcatcgggttagcagtaataccagaaagaccgtcagaaccaccgcactccagaccaaacttcagttcgctgagtttgcctggctcgcgtttatcgttgcgcatcacgttatacagctgatgcaaatgctcgattccggcttcgatctcatcatcctgctgttggcagatcatgaaatgaacgcgttcaggatcgatatcgcccagcgtttcacggaatgcggcaacctggttgttttcacagcccagaccaatcaccagcactgcgcctgcgttcgggtggcgcaccatgttttgcagcatggtgcgggtattaatgtgatcgtcgcccagctgactgcagccgtaggtgtggctgaagaggaacacgccgtcagtaccttcggcgttgttggtctctttcagaaaacggttctggatctgccgcgcgatgccgttgacacagcccacggttggcaggatccacagctcattacgcaccccgacatcgccgttagcgcgacgatagatctgcacttcacgatctgccgcttgcgcaggcagatcctgaaaatcaggttgatagcgatactgatccagatcgctcagattcgtgcgcgtattgtgggcgtgaacgtgaacacctgccgcaatatccgccaatgcataaccaatcggcaggccatatttgatgacattggccccttttgcgatatccgttaacgcaaatttatgtccacgagcaacatcctggcgcagcgtaacagtctggttatcgacactgacttctgtgccttcagccaaatctgctaaagcgaccgcgacgttatccagcgcatggatcttgatgtattgcatatcaaccccagaccttagttcagttcaatggcgaagtagtcacgcgcattgttaaagcaaatatttttcaccatctcgcccagcaggttgatgtccgccggtgcttcgcccgcttccacccagcgaccgatcatctggcacagaatgcggcggaagtattcgtgacgggtgtaactcaggaagctacggctgtcagtcagcataccgacaaagcggctcagcagaccgagctgcgccagttgggtcatctgacgttccataccgtctttctgatcgttaaaccaccagccggaaccgaactgcattttgcccggcataccttcgccctggaagttaccgatcatggtgcccagcacttcgttatcgcgcgggttcaggcagtacagaatggttttcggcagcaggttttcttcattctgcttgctcagcaacttagacagctcttccgccatcggacggtcgttgatggagtcaaagcctacatccggccccagcagtttgaactgacgcaggttgttattacgcagcgcgccaatgtggtactgctgtacccagccgcgacgtgcatattcggcaccaaggaacaccagtaccgcagttttgaactgcgccacttcgtgctcgctcagggtttcgccagccagacggcgcgccagaatgctgtccagttccgcttcgttcgcttcagcaaacatcaccacatccagcgcgtggtcagacactttacagccgtgagcggcgaagtgatccagacgtttggtcagggcagtttgcaggtcagcaaagcggcgaatgtcggtatcggaaacttcgcccagcttcgccatgtagtcgttaaaggtcgcctgttcgatgttgaaggctttgtccggacgccagctcggcagcactttgatggtgaaagagccgtctttggcgatctctgcgtgatgctccagagaatcgatcgggtcatcggtggtgccgaccattttcacgttcatctgctgcatgatgccgcgcgcggagaagttatcctgcgccagcagttcgttacattcgttccagatttcatcggcagtactcggagaaagcaatttgccagtgataccaaacggacggcgcagttcgaggtgcgtccagtggtataacgggttgccgatagtgtgcggaacagtcgccgcccaggcgtcaaatttttcacggtcagacgcatcaccggtacacagacgctcggccacaccgttggtacgcatagcgcgccatttgtagtgatcgcctttcagccagatgtcatacaggtttttaaaacgatagtcttccgcaatctgctgcggcggcaaatggcaatggtaatcgaaaatcggctggtcttttgcgtagtcgtgatacagacggcgggcaaattcggtatctaacaggaaatcttcagtcataaacggagtcattttcgtcttcctctcaacgagtgagctagcttgcttatggtgcgatgctgacaaagttatcacaccaatttccagagtccgaagatattttcgtgagttagatcaataaacgtagttaaaaaaattactctcaaagtggtaaatctcgctgcaggccgcgccagtactggccttgctgtcgtcaggtaatgtccctacaaatattcccacatttgtgatggctctcaccttttaaagttgtatgacaagttatctttctgccgtcgcaaatcataagtcgacggaatgcaaattgccgattcattcatttgttagatgaatcgggttaaccggtacggaagccgaattagcacgaaactttcatggcaacgttcggggcgtgccggttttttttcggttacccggtcgtaactaacatcttcagcctctggcgggatgatggccgcgcttcctgcggatataacaaaacgatgaggttttacatgcgtaaaattaaagggttacgttggtatatgatcgcactggtgacgctcggcaccgtgcttggttacctgacgcgtaacactgtggcggcagctgcgccaactctgatggaagagttaaacatctccacccaacagtattcctatatcatcgcagcctattctgctgcttatacggtcatgcaaccggtagcaggttatgtactggatgtgctgggtacgaaaatcggttatgcaatgtttgctgtgctgtgggccgtgttctgtggtgcaaccgcgctggcaggtagctggggtggcctggctgttgctcgtggtgcggtcggtgccgcggaagcagcgatgatcccggcgggtctgaaagccagctccgaatggttcccggcgaaagagcgttccatcgcagtaggctactttaacgtaggttctagcattggtgcgatgattgcgccgccgctggtggtatgggcaatcgtaatgcacagctggcagatggcatttatcatctccggtgcattgagctttatctgggcgatggcatggctgattttctataaacatccgcgcgaccagaagcatctgaccgatgaagaacgcgactatattattaatggtcaggaagcccagcaccaggtgagcacggcgaagaaaatgtccgttggtcagatcctgcgtaaccgtcagttctggggtatcgcgctgccgcgtttcctggcagaaccggcctggggtacttttaacgcgtggatcccgctgttcatgtttaaagtttacggctttaacctgaaagagatcgcgatgttcgcctggatgccgatgctgtttgctgacctcggttgtatcctcggtggttacctgccgccgctgttccagcgttggtttggtgtgaacctgatcgtttcccgtaagatggtcgtaacgctgggtgcagtgctgatgattggcccgggtatgatcggcctgttcaccaacccgtatgtcgcaattatgctgctgtgtatcggtggttttgcccaccaggcactgtctggcgcgctgattacgctctcttccgatgtgtttggtcgtaacgaagtggcaacggcaaacggtttaaccgggatgtccgcatggctggcaagtacgctgtttgcgctggttgtcggtgcactggctgacaccatcggcttcagcccgctgttcgcagttctggcagtgttcgacctgttaggtgcgctggttatctggaccgtgttgcagaacaaaccggcgattgaggtggcgcaggaaacacataacgatcccgcaccgcaacattaacgtttcgtgtaagttttagtttcccttcaaagccgccttctcaggcggctttttcatcactgcgagtagagctaaactcgcaaaagtggtataacaaatatagtctgccgtatcatgcctggagcgcatatggaaatcactgaaccacgccgtttgtatcaacaacttgccgctgacctgaaagagcgcatcgaacagggcgtctatctggtgggtgataaactgcctgcagaacgctttattgccgatgaaaagaacgtcagccgtacggtagttcgtgaagccatcatcatgctggaagttgaaggctatgtcgaagtgcgtaaaggtagtggtattcatgtggtttccaaccagccgcgccatcagcaggcggctgacaataatatggaattcgccaattacggtccgtttgagttgcttcaggctcgccagctcatcgaaagtaatattgccgaattcgcggcaactcaggtaacgaaacaggacatcatgaaactgatggccattcaggaacaggcgcgcggcgaacaatgcttccgtgattccgagtgggatttgcagttccacattcaggtcgctctggcgacgcagaactccgccctggcggctatcgtggaaaaaatgtggacccagcgtagtcataacccgtactggaaaaaactgcacgaacacattgattcccgtaccgtcgataactggtgtgatgaccacgatcaaatcctcaaggcgctgattcgcaaagatcctcatgctgctaagctggcaatgtggcagcatctggaaaacaccaagatcatgttatttaacgaaaccagcgacgacttcgagttcaatgccgaccgctatctattcgccgaaaacccggtggtgcatctcgatacagccaccagcggcagtaaatgaaattcctgtccgacaggcgctgcaatgcgcctgtttgtctcgtcggtaagcgaaaagtataaagtgtcagcctgtgtaaatcctctcgccaccctcccctgcattcagcaaaatcagactccacggacatgtaattttgataacgaacaacgttgacctttgttacaattagattcaatttgaatttatgtttttgaatgctttcttatctcacgatttaacagggaatagttcaggctgtgttgatgtatcaaacccgcagaacataccaaaacagcaataacattgcggtagtgcatcttttaaaaccagcgtggcgttaaccgattcaccaggaataatgaatggaacttttgacccaattgctgcaagccctgtgggcgcaggattttgaaaccctggccaatccaagcatgattggcatgttgtattttgtcttgtttgtaattttgttccttgaaaacggcttgcttccggcggcctttttaccgggcgacagtttactggtattggtcggcgtgttgattgcgaaaggcgcgatgggctatccgcaaacgattctgctgctgaccgttgccgccagcctcggctgctgggtcagctatattcaggggcgatggctgggcaatacccgcaccgtacaaaactggctatctcatttacccgcgcattatcatcaacgcgcacaccatctttttcataaacacggtttaagcgcgctgttaattggtcgctttattgcgtttgtcagaacactgctgccgacgattgccgggttaagtgggctgaataacgcgcgctttcagtttttcaactggatgagcggtctgctgtgggtattgatcctgacaactctgggttacatgctcggcaaaacgccggtatttttaaagtacgaggaccagctgatgagttgcctgatgctgctcccggtggtgctgctggtgtttggcctggcaggttctctggtcgtgttatggaaaaagaaatatggaaatcgggggtaagggatgcaaatacctcgcatgagccttcgccagctagcctggtccggcgctgttttacttctggtcggcacgctgttgctggcctggtccgcggttcgccagcaagagtctacgctggcgattcgtgccgttcatcaaggcacaacgatgccagacggttttagtatctggcatcaccttgacgctcatggcattcctttcaaaagtatcacccccaaaaacgacactctgttaattacatttgactccagcgaccagagcgccgccgcaaaagcggtcctcgacagaacattgccccatggctacatcattgcgcagcaggacaataacagtcaggctatgcagtggctgacccggttacgggataactctcatcgcttcggataacttcctgttatccgaaacatatcactcactttggtgatttcaccgtaactgtctatgattaatgaggcggtggttaacactaccgcttcgttgtctggacaatcgttcctttgtaataggtccgaatcacaatggaaggttcaagaatgaaataccgcatcgctttagctgtttctctctttgctcttagtgccggtagttatgccactaccctgtgtcaggaaaaggagcaaaatatccttaaggagatcagctatgccgaaaaacaccaaaaccagaatcgtattgacggtctgaataaagccctgagtgaagtccgggccaactgtagtgatagccagctgcgtgccgatcatcagaagaaaatcgcaaagcagaaagatgaggtggcggaacgccagcaagatttagccgaggcgaagcaaaaaggcgatgccgataagattgccaaacgcgaacggaaactggcagaagcgcaggaagagctgaaaaagctggaagcgcgcgactactaactcacaatagtcactacttactcacctggagaaaactatgagcaaagaacacactacggaacatctgcgtgctgagttgaaatccctttccgatacgctggaagaggtgcttagcagttctggcgagaagagcaaagaagagttgagtaagattcgtagcaaagcggagcaggcactgaaacagagccgttatcgcctgggtgaaaccggtgatgccattgccaaacaaacccgtgtcgcggcggcgcgtgccgatgagtatgtgcgcgaaaatccgtggacgggcgtgggcattggcgctgcaatcggtgtagtgctcggcgttctgctgagccgtcgttaattatggcggacactcatcacgcacaagggcccggtaaaagcgttctgggcatcgggcagcgaattgtttctatcatggttgaaatggtagagacacgtctgcggctggcggtggtggagctggaagaggaaaaagcgaatctctttcaacttttactgatgctgggcctgacgatgcttttcgctgcatttggtcttatgagcctgatggtgctaattatttgggcggttgacccgcaatatcgcctgaatgcgatgattgccaccaccgtggtgttgctgctactggcactgattggcggtatctggacgctacgtaaaagccgtaagtctacgttgctgcgccatacacgccatgagttagcaaacgatcggcagctgctcgaggaggagtcccgtgagcagtaaagtcgaacgtgaacgacgtaaggcgcaactgcttagccagatccagcaacaacggctggatctttccgccagtcgtcgtgaatggctggagacaacaggcgcttacgatcgtcgctggaatatgctgctaagtctgcgctcctgggcgctggttggcagtagcgtgatggcgatctggacgattcgccatcctaatatgctggtccgctgggccagacgcggttttggcgtatggagcgcctggcgtctggttaaaacgaccctcaagcagcaacagcttcgcggttaacttccctctggccggagccattccggccttatccctcaaattttttgaagatttttgacagttttccttgctaacaatcatcattcaccacgtttatgattctctccatcgacagcaacgacgctaataccgcgccattgcacaaaaaaacaatcagcagcctgagtggcgcagtggagagtatgatgaaaaaattagaagatgttggtgtactggtagcgcgcattttaatgccgattctgtttattaccgctggctggggaaaaattactggctacgcgggtacccaacaatatatggaagcaatgggcgtcccgggttttatgctgccactggtgattctgcttgagtttggtggtggtctggcaatcctgttcggtttcctgactcgcaccacagccctgtttactgcgggctttacgctgctgacggcatttttatttcacagcaactttgctgaaggcgtcaacagcctgatgttcatgaaaaacctgacaatttctggcggattcctgctgctggcaattaccggtccgggcgcgtatagcatcgaccgcctgctgaataaaaagtggtaagcacgcgctatacttaacgataaaaaacgaggaggaagctcctcgtttttgctattggaggagagaaaaatgggtcaactgattgacggcgtctggcatgacacctggtacgataccaaatctaccggcggtaaatttcaacgtagtgcttccgcatttcgtaactggctcactgccgatggcgctcctggccccactggcacaggcggttttatcgcagagaaagatcgttatcatctctatgttagtctcgcctgcccgtgggcgcaccgcacgctgatcatgcgcaaactcaaaggactggaaccgtttatttccgtttccgtagtgaacccgctgatgctggaaaacggttggacctttgatgacagttttccgggagcaaccggagacacgctctatcaaaatgaatttctgtatcagctttatctccacgccgatccacactacagcggacgagttactgttcccgtgctgtgggacaaaaagaaccacaccatcgtcagcaacgaaagtgcagaaatcatccgcatgttcaataccgcgtttgatgcgctgggcgcgaaagcgggtgattactaccctccagccctgcaaacaaaaattgacgaacttaacggctggatttatgacaccgttaacaacggcgtgtataaagctggttttgccaccagccaggaagcttacgacgaggcggtggcgaaagtgtttgaaagcctggcacgactggagcagattttaggccagcatcgttacctgaccggcaaccagctaaccgaagccgatattcgcctgtggactacgctggtgcgttttgatccggtgtatgtgacccacttcaagtgtgataagcaccgcatcagcgattacctgaatctgtacggttttctgcgcgatatctaccagatgccggggatcgccgaaacagtcaatttcgatcatatccgtaatcattacttccgcagccataagaccatcaaccctacggggattattagtattggtccgtggcaggatctcgatgaaccgcatggacgagatgttcgcttcggttaaaaaaaggcaccttacgaggtgcctctgataattagctaagtgcatgttgttcatgtcggatgtggcatgaacgccttatctgacatacaaaacattgtacattcaatagattgcataacccgcgcagaccagataagcgtagcgcatctggcgattttgcgcttgtcatcagtcttagcgcgccttcacggcactttattaattccttgaacgaatatttactgccatttcattcacgtctattcttaatttgctgctttaaaaacaagtgattgagcaaaattgaggcaaaaatggactggtatctgaaagtactaaaaaattatgtcggtttccggggtcgtgcgcggcgcaaagagtactggatgtttattctggtcaacatcatctttacgttcgtgctggggctgctggataaaatgttaggctggcaacgcgctggtggcgaaggcatcctgacgacaatctacggtattctggtgtttttaccgtggtgggcggttcagttccgccgcctgcacgacaccgaccgcagcgcgtggtgggcactgctattcttaatcccgtttatcggctggcttattatcatcgtctttaactgccaggcgggtacgccaggcgaaaaccgctttggaccagatccaaaactggaaccttaaaacaaatctgctcgccggatgtctgactcatccggcttttatcattatgttgatgaatgaataatttactaatgtttatttaaaatatttcaatgtcgttatataaattacctataaaaaataaccatgtatttatcttaaatatcaaaacctttataacatccgaaaaagaaagatacgaatagcatttacacaatacccggaatagactttcgtcacttttaattaaagggatgtttttatgcagtggtatttgtccgtattaaaaaattatgttggtttctctggtcgcgcacgtcgtaaagagtactggatgtttactctgattaacgccatcgtcggcgctattatcaatgtcattcaattgattttaggtctggagcttccatatctgtctatgctttatttgctggcaaccttccttcccgtccttgcgcttgctatccgtcgcttacacgataccgaccgtagtggtgcctgggccttgctcttttttgttccgtttattggctggctcgtgcttctggtttttttctgcacagaaggtacttctggcagcaatcgttacggaaacgatccgaagtttggtagtaattaatcttagaattggggcgatatttcgcccctttttattaacaataataaatattattttccgttaaaaagtttgggaatttcccgcagacaccaggatttcgcttcccccatactgtcacgacgccaggccataataatatcgatctcgctggtgctttccgggctgacgacacgcaaccgcccttccgcaatatctttttcgaccataggatacggcatcgtcgccacgccaagccccgccagtaatgcctgacgtttatcttcaatcgtgctcaccgttaagcgcggctgtttgtccagcagctgtacggtcaacaccgggcgctcacgagcggtatccgccaccgcaattccacgatatttcacacgcgtcacttcagataacggttccggctcctgatgaatcgggtgatcaggcgcggcaacgtagacgttcattaacgtatagagcttgcggctgttgatctcgctgctggaacgaaaatgcatatccggcgcgataacaatatccgcccgcccctgctccagccgttcccacgcccccgccagcacttctgtgatgattgccagttgggtattggcttttgccgccagtttgtcgattaacgggaaaaaggcaggtgtcggtaccagcgcttcggtcacaatggtgagatgcgtttcccaaccgcgcgcgagagcttccgcatcagtagtcagtttatctgcggcttccagcaaaacgcgccctcgctccaacaacatcctcccgacattggtgaatttggtacgatggccgctgcggtcaaacagcaccacatccagctcttcttccagtttttgcatggtgtagctaagtgcggaaggcacgcgtcccagctcatccgccgccgccgcaaaactgccccggcgatcgatcgcatccataacccgtagtgcttccagcgttaatgccctttctttggccatttcgttctcattcaggaaatttgaacataccgggcagaatatctggctaacaatgtagcgtccagccccttaccataaaaggaagtaaagagaggtcaagaattatgattactacccgaactgccaggcagtgtggacaagcagactacggatggttgcaggcccggtatactttttcctttggacactacttcgacccgaaattgttaggctatgcctccctgcgtgtgcttaaccaggaagtgctggccccaggtgccgcctttcagccgcgaacctatcccaaagtcgatattttaaatgtgattctggatggagaagcagagtatcgcgatagcgaaggcaatcatgttcaggccagcgccggagaggcgttgctgctctctacccagccgggtgtcagctatagcgaacacaatctcagcaaagacaaaccgttaacgcgaatgcagctttggctggacgcctgcccgcagcgagagaatccgctgattcaaaagctggcgcttaatatgggcaagcagcaattaatcgccagcccagagggtgcgatgggaagcctgcaattacgccagcaagtgtggctgcaccatatcgtgctcgacaaaggcgaaagtgcgaatttccagttgcatgggccacgcgcgtatttgcaaagcattcacgggaaatttcatgcgcttacgcatcatgaagagaaagcggcgctgacctgcggtgatggggcgtttattcgtgacgaggctaacattacgctggttgccgattccccactgcgcgctttgctgatagatttgcctgtctaattgtttttacagggagatgatgatgagtaaaaaattggccaaaaagcgccagccggtgaagcccgtggtggcgaaagaacctgctcgcaccgccaaaaattttggctatgaagagatgttgagcgagctggaagctatcgtcgcggatgctgaaacgcgtttagccgaggatgaagctaccgcgtaaagacaggttgccggatgcggcgaaaacgccttatccggcctacaaaatccaacaacattaacgaattaaacaacccgtaggccggacaagatgcgccagcatcgcatccggcacgatccccaaaacctggcgtttatctggccttgctcgccataatctcgataatctgccgatccgtttgctgcatgctatggcttgctaacgcacacaggttggcaatgctctgctcaacatcatgcgccacaatcccttcattgccggtcacggcggtatcatccagcgccattaacaccgctttccacgcagcgctagcactggtgctaaccttcatcgcgcagctgttgctcgcaccatcgcaaatcatgccgctgacatcgccgatcatactgctgatcgccatgctgatggtttcataacgcccatccaccagccatgccatcccggcggcggcccccattgctgcggtcgttgcggcacacagcgcagacaaacgcggtaactggttatggatgtaaattgcgctcaaatggctaagcatcagcgcacgcgccagccgttcatcatccgctccgaagtgttctgctaccaccaccacaggcattgttgcggtaatcccctggttaccgctgccggagttactcatagccggaagcgtagcgccgcccatacgcgcatcggatgccgcgctggtacgaatcacaatggaactagagagatctttcgccagcaaaccgcgctcgcactgtttttccagcgtcgcgccaatatgcagcccccacttaccgctcaaaccttcctggcttaacgcacaatttagcttcgcggaatcgagaataaagcggatcgccgcaaacgggacttcattgacgaacttcaggatctcagccagcgtcgttctggaaagcaccgtcagcggagactcttgctcgccctctgccacacacgcctgctgggtaaacaccacaccatcgtgcgtctcgatatgcacaatgttggtatgcccgccgacgatggtgacacacgcccacttctcaccgttccagactttggcgcgactgaagaggatttcatcgcaaggttcctggatcttaacggagactttccccgccgccagcagtgctttggcatcggcaattgcctgcgctgttgcgtctttcagcacttccagcccggcgttggcatttccacctaacgcccccagcgccgccgcaatcggcagccccaccattcccgtgccgggaacggtgacgcccagaccgttcttcatcagatttgggctaacccaggcttctacacgttcaaccggaccttccagttctgccgcagcaaccgccgccgccagcgccagactaatcggttcagtacatcccagcgccggttttacttcctcctgaacggcgaggatgtaacgctgccataacggatttaaagtgctatcaaacatattaaaaaccttaaaatttcaggtaaatcaagaaaatgccaggaacggagaaacacacagcaacaaaccagtgacgataatcaggtacagagacatccctttgtatttgtgcaatgctggtactttgtaaaccagccacgccgggatcaggcaccctaccatgccgaaaatcgggctacagatagaggtgaagctcaacaccggtgcgttcagtacgatggcgctccaggccagcaaaatggcgaaaatcatgatgccgcgctgaacgagattttcgttaatcttctcggcaggcatcttgcgacgcaggatgttcattacgatcccttgcgttgcttcgcgaaagcctaaatagacgccaaagaatgcagtcatgacagcaaagatattgagaatgacgctgaccactttcacccacgctgcgccgtcaccgctaataaactgtgcggcaatcgccagcgcggaaatattctgctcataggcttttaccgcttcgtcatgtcccatcgccagcgtgaagctcacggcgtagaaaaagacggtgacaaacaaaatgccaaacgcgatattcattgcccgcaatgctttatgccgcgccacttcaatacttttttcccggctgcgataagagatcaccatcggacttaacgtctggataaacagaatgctcgtcagggtaaacggcagcgtaataatggcgtttttcaccagcagccccagcggcggtaggctaccgacgttatacagatgccacattcccaccatgctcacgcccagcgccgcgaccaccagcagcttggtcagcaccatgccggtgctaattttgaataacaatttctcgccgcgactggagatcgccaccagaatgcaaatcagtaccagaccataaaagggactgtcactcagcaacccttccgtcacgccgaaggtatgcaggtaggaagcactatcgttggtgatggcggtggaatagacgaacatccaaatcaccagcattacgaaatagagcgcacctaacaggatgccccagtttttacctaaataaccgctaatgacgctcgggtaatctttacattctggactttctgccagcgtattaataaacaatcgctgaaacagatacattgccgggtaaccaatcacgctactgagcaaaaatacccacaatcccatcaaaccgacctgcaccgggagaaaaacaatccccgcgccaatcgccatcccgatactcataatcacccagccggtgtcagtactgtcgaatttgatcgcttctcgccactcgctctcactcattccagcacgacccgccggggtcgaagcgtctgcaatgacgcctttattcgatgcaatttccataatttctcgctcaatattttgtagggcttattatttttttccgagccgcatcaaggcgatatgcggtctacgtttttgcaggcgagttattagaataaagaaatgatacgcgcgaggtcagagaaaatcttcacaatcaagactttgaaataacggagatggataagaattttctactaaattaatcgcaggagaatattcattctctatttgcggcagatcacaaaaaaaaggtgcacatttgtgcacccaaggatgaaagctgacagcaatgtcagccgcagaccactttaatggccagtcctccgcgacttgtttcgcggtatttatcgttcatatctttgccggtttcatacatcgtctcgatcactttatcgagactaacacgcggtgcgctggtgcggcgcatcgccatccgcgcggcgtttactgctttcacggcattaatggcattacgttcaatgcacgggatttgtacctgtccggcaaccggatcgcaggtcagcccaaggttatgctccatcgcgatttccgccgcattgcatacctgcgccggactgccgcccagtagttcagttaaccctgccgccgccatactacaggccacgccaatctccccctgacagccgacttccgcgccagagatggaggcgttcattttatacagcgcgccaatagcccccgcggccagaaaatagcgggcaatactccgctcgtttaccggacgacggaacttatcgtaataagccagtactgccggaataatgccgcacgcaccgttagtcggtgccgttaccacgcgcccgccagctgcgttttcttcactaaccgccagcgcgtacatgttgatccagtcgatgacattcatcggatcgttagagatgttatcgctggaaaccagctgacgacgcagcgctacggcacggcgcggcacattgagcggaccaggcagcacgccttcagtgttcatcccacgttcaataccgtcatgcatcacttgccagatacgggcaaaaccggcgtcaatttccgctttgctgcgcagcgctagctcgttgtgcatcatcagaccagatatagacaggccgttgtaatcacacattttcagcagttcacctgcactgtggaaatcgtaaggtacggacgtttcgacatcgtggctcaggccgaagtgttcttcttcgacaataaacccgccgccgacagagtaataggttttacttaatagctcttcctgtcccttccaggcagtgatccgcattccgttctcatggcgaggcaacatttcgggatggaagataatgttctttgctacaggaaaatcaacaatatgcgcaccagatgccactggcagccgcccgctgcgcgttactaactctataaatgcagggatctcatcaatgacaacatcctgcggactgtttcctgccagtcccatgatgatggcgacatccgtggcatggcctttgcccgtcagactcaagctcccgtacagatcgaccacaatatggctcgtcgcggttaataagccgctactttccagccgatcaataaaactttttccggcattcattggccccacggtatggctactggagggaccaatcccaattttgaaaatatcgaatgcactaatcatatccacaccctcggattgccgttcagtgaagtggagcggaacgaccttacgaccgtcccgctcacgaggctttacgcactacgtactgcgatggcttcaatttccagcttcacatctttcggcaaacgcgcgacctgcacacagctccgggtcggataggtcgcctgatgctcatcgaagaactgcttatagacttcgttgatggtggcaaaatcattcagatcggtgataaacacggtcatcttgatgatatcgcccacgctcagcccggcagcaaccacgatcgctttgacgttttcgaggcttaaacgcgcctgatcttgcacatcagccgggatctcaccggtctgtgggcaaaccggtatttgcccggaggtgaagaccatgctgcctaaatcaacgccctgaacataagggccgattgcgcctggggcacgttgcgtttcgataatctttttcatacatcctccggcgtcagagcgcctgggtaaaggtacgactaataacatcctgttgctgttcacgggtcagtgcgttgaagcgcacggcgtagccagagacacggattgtcaggttaggatatttttccgggtgctcgatggcatccagcagcatttcccgattcattacgttgacgttgaggtgttgaccgccttcgacatccgcttcgtggtggaaatacccatccagcaggccgacaaggttggttttacgtactggatcttctttgcccagcgccgcaggaacgatactgaaggtgtagctgatcccatctttggcgtaggtgaacggcagtttcgccacgctcgtcaaactggccacggcacctttgcggtcacgaccatgcatcgggttagcgcccggcgcgaacggtgttccggcgcgacgaccgtccggcgtattaccggttttctggccgtacaccacgttagaagtgatagtcagaatgctctgggtagggacggcgttgcgataggttggcagcgctttaattttcttcataaagcgttcaaccaggtcgcaggcaatgctgtctacgcgctcgtcgttgttgccgtactgcggatattcaccgtcgatttcaaagtccaccgccaggccgttttcgtcacggattggtttcacgcgggcatatttgatggcagacagggagtccgtcgccacgctcaggcccgcgatgccgcatgccatagtgcgatagacatcacgatcgtgcagcgccatcaggctagcttcgtagctgtacttgtcgtgcatgtagtgaatgatattcagcgcgctgatgtactgcaccgccagccagtccatgaagtgatcgaggctgtccatcactttgtcgtaatccagcacgtcgtccatcagcggtgctgttttcggcccgacctgaatcttcagcttctcgtccaccccgccgttaattgcgtagagcagcgttttcgccaggttagcgcgtgcaccaaagaactgcatttgcttaccaatcaccattgggctgacgcagcaggcaatcgcgtaatcgtcgctgttgaagtcagtacgcatcagatcgtcattttcatactgcaaggaagaggtgacgatgctcacctgcgcggcatattttttgaaggcaatcggtaattcttcgctccaaagaatggtcaggttaggttccggtgccggccccatagtgtgcagggtgtgcaaatagcggaaggagtttttggtcaccagcgtacgaccgtccagccccatcccgccgatcacttccgtcgcccagattgggtcgccggagaacaggctatcaaattccggtgtacgcaggaagcgtaccatacggatcttcatgatgaagtgatcgatcagttcctgtgcctgctgctcattgagtacgccagctttaaagtcgcgctcaatgtagatatcgaggaagcttgccgtgcggcccaggctcatcgcgccgccattttggcttttcactgccgccagataagcgaagtagagccactgcaccgcttcctgcgcattctgcgccgggcgagagatatcaaagccatatttcgccgccatttcctgaatctgcaacagcgcatgacgatgctctgccagctcctcacgcagacggatggtggcttccagatcctcgcctttttccagacgagactggagatcggcaaattgcagttcgcgttcacgtaccagataactgatgccatacagcgctacgcggcgatagtcaccgataatgcgcccacggccatagccatctggtaaaccggtcagcacgccagatttacggcagcgcagcatatccggactgtaaacatcaaatacgccctggttatgggttttacgcagatcggtaaacagatattcaaattcactgtccatttctcggccataggcgtggaaactacttttaatcatattaatgccaccgaacgggtgtagcgcacgtttcaacggcgcatccgtttgcaggccaacaattttttccagcggctggttaatatatcccgcatcatgagcggtaattgtggtggcaatattggtatcgaaatcaaccggcgcgtgggttgcattttcgatacggatgccttccattactttttcccacaattccgtggtggcaggcgtcgcttcggcgaggaaagattcatcgccttcatacggtgtatagttatgttgaataaaatcgcggacattaatttcgtttttccagtccgtacctttaaagccaagccatgcgtcggcgtacagcttatcgctggtatcaatatctaccttcatgaaaaataatctctctacaatacttcaactaaattatgcaaattctgcgggcgcgttaactttgcctaaatgaatggcatccaaagcaatcattttttcttcgttagtcggaataacggcacaaatgacacgcgcattttcactggaaacaattcgctcaccacaggagttagagcgattattcatttctgtatcaatctctaagcctaatacagccaaatgttccatgaccagacgacgaattaagctactattctctcctattccgccggtgaatataattccatccaggcgacgtaaactagctgcgtgtccggcaatatgacgggcaattcggtgaacaaaggttttaattgccagttgcgcgcgttcgtgaccttcatgccaggctttttccagaacacgtaaatcgctagaaagaccggaaatacctaataatccgctctctttattcactacgcgttccaggtcacccaggctctggttggtttggctggcgacccaggacatcgcaccaaagtcgacatcgccactgcgggtacccatcatcaagccttccagcggcgtcattcccatactggtatcaacactctgaccgttgcgaaccgcgcagatactcgcgccattgccaagatgcgccacaaccaggccggagtcatcttccgccagattcagcaggctatgtgcgcgctgggaaacatagcggtggctcgtgccgtggaaaccataacggcgtacacctaactcttcataatatttccacggcaggccgtataaataagcttccggagccatcgtctggtggaaactggtatcaaataccgccacctgagttacgcccggaaataattgctgcgcgctttcaataccacttaaattggcgtaattatgcaggggtgccagtggagaaacgcgacggatattatcaatgacttcatcggtaataatggcggactcggtaaaaatactgccgccgtgagcgatgcggtggccaattaaggccacactgtcatttaaattccgtttttccagttcaaatgcaattgccttcaatgcaccttcgtagctgtggtgagccagcggtgctggctctcccccatttacggataagaatgcattttcgctgttaataccgtcggcaataccactcattaatacttcacagtcgctggcatcgagcacggaaaacttaatgctagagctaccacagttaataaccaaaacaaccggaaattcattcatctcttttctcatcctgagttacggattaaaacagtttgtatacgatgttcaggatggtcagcagaccaatcacggtaacaaacacgttatccagacgaccacggtatttcgccagagacggcgctttacggatggcatacatcggcaacaggcacagcagggatgcgataatcggtgcgcccatggcttcaatcaggtcaaggatgttcgggttggcgtaggcaacaacccaggtggagcccatgatgaagatcatgctgatagtgttcagtttacccaggctcactttagttttgtcgcctttataaccaaacttcaggaccaggccattcagaccttccagcgttcccagatagtgaccgaagaaagatttgaagatagccacgagtgcgatgatggaagccgcatattccagtgtaatcgcgaacgttgttttggtaccggtcatggacgcaaagtggttagccagataagaaagcactggaatattctgcgctttggcttccgccatgttggccggagacagagtaaacaggcagctaaaggcaaagaacatcaccactgcaaccatcagcatgctggcacgagaaatgatttgggaacatttacgttcggtgaagtcgcgaccgaagtctttctcatactcttcacgcttagaaaccacgaaggaagagacgattgggctgaagttaaaggagaaaaccatgatggaaatccccagccagacagtgatcaggataccgtcatgaccggttaagctcaggctaccgaggtcaacctggtcgataactgcagagttccagtaagggatcaggctcaaagaaatcagcaccaggctggcgataaacggccataccaggtagctcatcactttaaccatcagatccttaccaaaccagatgacgaaagccatcagcagcaacaggaacagcgccacaaagccgcgattcagcggtgcaaagccgagctggttttcccagaacgtcataaaggtattggtaatagtaacgccataaatccacagcagtgggcaaatcgcgaagaagtacaggaacgtgataaccacgccgccagttttaccaaaatgctcttccaccgtttccgtaatgttgccggaagggttagagccagaaagacacagacgcgccagcgcccggtggcaataaaacgcgatggggtatgccaataccaacatcagaagaatcgggatcagtccgccaaaacctgcgcggatagggaagaacagcaccccggcgccgattgccgtaccaaacaagcctaacgtccatgtggtatcacttttacgccaggagctttgttttgtctggctggatacaatgctatcactagtactcatatcctatcctcaacgaattaattaagcgtcaacgaaaccggtgatttgagagacgcgagaaagatcgatattgccgccggaaataatactgacggtttttctgttttgaatatattggtctaatttaccgcttaataatgcagcacatgccagagcgcctgcgccttcggtgacgactttattgcgctgaattaaggcaatcatactgtttctgatttcgtcttcgctgaccagcacgatgtcatcgactaattcacgaacgatttcgtaagttaaattacccgggcgggagacatcacaaccatccgccagggtgccggtagttcggtgcgtggttatttctccggagtggaaagaagccgccatgccgtgaacgttttcagactgtacgccaataacacgaatggtcgggttaatagatttaattgccaccgcaataccagcaattaaaccgccaccaccaattggcacaatcacgttatcgacatcatagagatcttccataatttccagaccaatcgttccctggccagcaatcactttcggatcatcgtaaggtgggataaaaatacggccttccatttcgacaatttcgctcactttagcgatagtgtcgttgaagttatcaccatgcagaacgacttctgcggagtagtcgcacgttgccgctactttggattttggcgcaccttttggcatcaccactttaccgtcgatacccagcatcgcgcaggagagggaaaccccttgcgcatggttgcccgcagaacaggccaccacgcctttgcgtttttccgcatcggtcagactacttaatttattaaatgcgccacgaattttaaaactacccgtacgctgcatattttcaaacttcaggaatatttcacctttgcaacgttcactaaaatagttggagcgaggcatgcctgttttataaattcgcccagccagtcgttgtttcgcttcaataatgtcatcaatagcaaccggcagatcgtatgtaatatgcattataaaacctcttcgcctgaattaaatatgtaggtaaccgtaaccgacacctgcaagacagacaggtggattatttatgtttaaataaaaacaaataattaaccaacttctattaattgccttcgtctacacccattataagaactatactctttggctaattccaccaaaacgcttgctgcttttttaatacgataatttttgctccataccgcggcatattgtgccacaggtaatgtttcttcaaccggaatagtaataaattgattagaaccaaaaggactcgtcatatcacaaggaattacagttaagaaatcagcattgagaacaagattataaattgtcacgacactgtcggttttaacgatgttttcaatactgatgccatttctttgtaacgtagtaagcagttcgctgtagtaccccatattagtttgtggcaacacccactgttcgttcttcaagctctccagcgtggtggtgccggtgcatgttcgggacttactggctaccagcacaaactcggactcgaacagcggctcaacatgtaaatcctgaagcttcatttctgcacttaacgtaccaatcgcaaaatccagtcgaccgtcgcggattgccggtaagaagctagacagttgcgcttcatacatagaaacctgcgctttcgggaacacctctttgaacttgttgatcatcccactcataaaagtaaaaccaatcaaactaggaaaaccaaaactgacttccaccaccgcctcagaagacataccgcttatctcattaaccatatttttcatttcacgggtaatggattcggaacgggagagtaacaattgaccggcaggtgttaatgttacaccggtatttttccgcaccactaattccacaccaaaataatcttcaatatcgttaatgattttactgacggccggttgagttaaccctaattcttttgcagcgctgccgatagaaccacttctaatgacttcctgaaagactaccaggtgctgcgttttcggaagaagaatagtgctcataacgacctacgttaattacctcattgacggcatgaagtgtatcaaaatgaaatgaacaggatatgtgcgaccactcacaaattaactttcaatactttccagagtatcgttattacaattaaatacctttaaatatcaacaagttaaagtataaaaatcagcataaaccctgatttttgtcaaaaaaaatgacggggataaccatattttatggcgataacatcattcgttatgtggttaatacaaaaaaggggctgagaccatatttcaagcaattaccggataattaccaggcaaaatttgagttaaatttaatgagcaagttcagtaattttattataaataaaccatttagtgtgataaataatgcggcatgtcacatttttagtcgctatttgttggagaacaaacatttattttatcaatattttaaaattagcaatacatgtattgatcatctcgaacaattgattaacgtcaactttttctcttctgacaggacgagtttttgtgaatgcaatcgttttccataaattcttctcccctcataggcgacgaatagcattttgtgttgaggattacaaaacgaataattgctgatcgccgcgataaggtcagacaaagacaacaagggaaattttcacagagcttttgatcggcgtaggccacagaatgttgcttcgtttactgtaacgccgggtaaatgagcgttttttgatagtgcgaaagaaccctgcgaggaaaataagcatctattattgtttgtcatgatgacaaggcaggcatcaatgaaaggcttcccaattgcgcatatttttcaccctagtatcccgccaatgcacgcagtggttaacaatcacaatagaaatattgattattggacggtaaaaagaaagtttgcagaaattgtctccaccaatgacgttaataaaatttacagtataagtaatgaactgcggagagtattatctgcaataactgcattgaatttctatcatggcgatgttccttctgtcatgatccgaatccaaccggaaaatatgagtccattcattatagatatttctacaggagaacatgatgattatatcatacaaacattagatgtaggcacttttgcaccttttggtgaacaatgtacttgcagtgccgtcaataaaaaagagctggaatgtattaaggagacgatttctaagtattgtgcaaaattcacccgaaaagaagccatcttaaccccccttgtgcactttaataaaaccagcattactagtgattgttggcaaattctcttttttagtcccgatcattttaataatgatttttattgattatttataaaggataaaataatgttccctgttagtagtattggtaatgatattagtagtgatttagtccgtcgaaaaatgaatgaccttcctgaaagcccaacaggaaataacctcgaagcactagcaccaggtatagaaaaactaaaacagacctctattgaaatggtcactttacttaacacgttacaacctggtggaaaatgcattatcactggtgattttcaaaaagaattagcgtacttacaaaatgtaattctttataatgtcagctctcttcgtctggattttttaggttataacgcccaaattattcaacgaagcgacaatacttgtgaacttaccattaatgaaccgttaaaaaaccaggaaatatccacaggtaatatcaatattaattgcccattaaaagatatttacaatgaaatcaggaggttaaacgtaatttttagttgtgggactggagatatcgttgatctatcctctctggacttacgtaatgtcgatttagattattatgatttcacagataaacatatggctaatactattttaaatccttttaaattgaatagtacaaattttactaatgccaacatgtttcaggttaattttgttagtagtacacaaaacgccacaatctcctgggattatttactaaaaataacgcctgttttaataagcattagcgatatgtattctgaagaaaaaatcaagtttgtcgaaagttgtttaaatgagcctggagacattaccgaagaacaattaaaaattatgagatttgcaattataaaatctataccaagggcaactcttacagataaattagaaaatgaattaacaaaagaaatatataaaagcagtagcaaaatcatcaattgcttgaacagaattaaattaacagagatgaaagaattcagtagtgaaaaaatatatgattacatcgatataatcattgaagattatgaaaataccaaagaaaatgcttatctggtcgtcccccaaattaattatactatggatttaaacatagaagactctagcagtgaagagttacttagtgataataccctcgagaaagacgaaaattctccggacaatggctttgaggtcggggaatataacacatatgaagcatataacagtgagaagcaatattttaccagagaggactatacgtatgattacgaccttttaaatgcaatataaacttaataacttcttacaaagtctattattaataccgtagatatttattcatcttaccctgtgcaccaaaagcaaaaactcactgacgcgggtttgaaactgatggcaaccgcaaaaatgcctgatgcgctacgcttatcaggcctacgccatctctgcaatatattgaatttgcgtgcttttgtaggcaggataaggcgttcacgccgcatccggcatgaataaagcgcactcaacaatctgaaacccgccggaacggtttattacgtacatcaggtaaaactgaccgataagccgctttcttttgggtatagtgtcgtggacagtcattcatctttctgcccctccaaaagtaaaaacccgccgaagcgggtttttacgtaaaacaggtgaaactgaccgataagccgctttcttttgggtatagtgtcgtggacagtcattcatctttctgcccctccaaaagcaaaaacccgccgaagcgggtttttacgtaaaccaggtgaaactgaccgataagccgctttcttttgggtatagcgtcgtggacagtcattcatctttctgcccctccaaaagcaaaaacccgccgaagcgggtttttacgtaaatcaggtgaaactgaccgataagccgggttctgtcgtggacagtcattcatctaggccagcaatcgctcactggctcaagcagcctacccgggttcagtacgggccgtaccttatgaacccctatttggccttgctccgggtggagtttaccgtgccacggactgttaccagccgcgcggtgcgctcttaccgcaccctttcacccttacctgatcccgcttgcgcgggccatcggcggtttgctctctgttgcactggtcgtgggtttcccccccaggcgttacctggcaccctgccctatggagcccggactttcctcccctccgcccgtctcccccgaagaggacgacgacgaagcggcgactgtctggtcagcttcggcgcgcagtatagagggtttgcgcgcccttgtcaccccgcgttgcgcattccaatcgccagtgtcgcggcgatattacgactagcacggcagatattgtcataagccccgcggaatgcttcgtccaacgtacctatgctggtcaatacgctgaagaccgcatcaatgccatgctgatgtacaacgccaacatcatcggtcaggctacccgcaatgccaatcaccggtttatggtacttcttcgccacgtttgcgacaccaatcggtaccttcccgtgaatactctggctgtcaatacgcccttcaccggtgatcaccagcgtacaatcgtgaatatgttcctccagattcagcgccgtagtgacgatttcaataccacttttcagttccgcaccaagaaacgccattagcgccgcgcccataccacccgcagctcctgcaccggggacatctttcacatcaacatgcagcgcttttttaatgacctcggcatagtgagagaggttattgtccagctcaacaatcatcgcttcactggctcccttttgtgggccaaagatgcggcttgcgccgttatcgcccaccagcggattggtgacatcacaagcgacgcgaatgacgcaatcttttaagcgcggatcgaggccggaaatatcaatatcattcagagtattaagactaccgccgccaaaaccaatttcattgccgttggcgtcgcataatttcgcccccagcgcctgtaccatgcctgcgccgccatcatttgtagcgctgccgccaatgccgataataatgtttgtcgcaccgctctccagcgcctgcaggattaactcgcctgtgccgcgactagtggtcacgagtggatcgcgtttttccgcaggtaccagctccagcccactggccgccgccatttcaataaacgcggttttgccatcgccggagatcccccaactggcattcactttctcgcccagcggccctgtaacccaggcgtgacgttcagccccctgggtggctgcaatcatcgcttccaccgttccttcgccaccgtcggcaaccggaacagaaacgtactgtgcatcaggaaaaatttcccgaaatcctttttctatcgcctgcgcaacctcgctggcagataaactttctttataagagtctggggcgattacgattttcatacctatgcctgttaccacatgacgccggagggcgtttctcttattcggcctggattccaggcccggattgcaatacgccatccgggcacgacgtcattaacgagtaacttcgactttcgccagtttttcgtagtagcacgccagggcgctatgatccgccgttcctaaaccatctgctcgcagtgcctgcatcatctccataaccgcagctgtgagcggcagttgtgcgccgacgccgtgagaagtatccagcgcattcgccagatccttaatatgcagatcaatacggaagcccggcttgaagttgcggtccatcaccatcggcgctttggcatccagcacggtactgcccgccagtccaccgcgaattgcctgataaaccaggtccgggttaacgcccgctttagttgccagcgttaacgcttcactcatcgcggcaatattcagcgccacaatgacctgatttgccagtttggtgacgttacctgcaccgatttccccggtatgcaccacggaacccgccatcgctttcatcaaatcatagtatttgtcgaaaatagccttgtcgccgcccaccatcacactcagcgtaccgtcgatggctttcggttcaccgccgctcaccggagcatccagcatatcaatgcctttcgctttcagcgcttcgctgatttcacggcttgccagcggtgcgatagaactcatatcgatcaataccgtacctggcttcgcgccttcaataatgccattctcacccagcgccacctctttcacatgaggggagtttggcagcatggttatgatgacgtcgcactgttcagcgatcgctttagccgtagacgctgtttctgcacctgcagcaatcacgtcagcaatagcttctgggttacggtcagcaaccaccaggctgtaacctgctttcagaaggtttttactcattggtttacccataatccccaggccaataaaaccaactttcatagtcatatcaatcatctctcttgttgcggtggtggttattttttaaaggtatcagccagtttctgagtggcagagcggaagacgccgagatcgctgccgacagccacaaacgtcgcgccccattccagataacgacgcgcatcggcttcgaccggcgcgaggataccgctgggtttgccgtgcgcgctggcacggttaaaaatgtgctgaattgctttttgtacatccgggtgacttgcattgccgagatggcctaatgccgcggccagatcgctggggccgacgaagatgccgtctacgccttcggtagcggcaatggcatcgacgttatctacgccctgctgactttctatctggaccagaatagtgatgttcttgttgctctgagcgaaataatccgccacggtgccaaacatattggcgcggtgagaaacggagacgccgcgaatgccttccggtgggtaacgggtacttgccaccgccagctctgcttcctcttttgtttctacaaaaggaatcaggaagttatagaaaccgatatccagaagacgcttaataattaccggctcgttggtcggcactcgcactactggcgcgctggcgctgcctttcaaggccattaactgcggaataaacgtggagatatcgtttggcgcatgttcgccatccagcaccagccagtcaaacccagccaaaccaagaacttcagtgctaatcgggttagagagtgcactccagcaaccaatttgtacctgtttcgcagccagtgcggctttgaatttattcgggaaaacatcgttattcatcgcttatacctttgcttatttctgcaattccatacgtttaatgtcgccaactacgaagaggtagcagaccatcgccatcagcgcactacatcccacgaaaaccagtgctgcattgaaggagtgcagttcacttaccaggtagccaatcaccagtggagtgacaatggaggcaacattgccaaagacgttaaagacgccgccgcagaggccaacaatctctttcggcgcggtgtcagaaatcaccggccagcccagcgcaccaaatcctttgccaaagaaagccagcgccatcagcatgaccaccagcgtggtgttgttggtgtagttacataagatgatggtggaagccagcaacattcccagcacaatcggtagcttacgtgccagggtcagggataaaccgcgtttgatcagataatcgctgaagacacctcccagcacgccgcccgcaaaaccacacagtgctggaatgctggcgaccagacccactttcagaatgctcatgcctttttcctgcaccagataaatcgggaaccaggtgaggaagaaccaggtgatggtgttgataaaatattgtccgaaaaatacgcccagcatcatgcggttagagagcaattgcttgatgtaatgcagtttgggtccgcttgctgccgcactgcccggctttttgtggtccatatcgaccaccgcgccattttcagagataaacttcagctcttccgcagacatacgtgggtgatctgtcgggttatgaatcaacttgatccacagcgccgtcagcacaaaaccaatcacccccataacggtaaagacgtgctcccagccccaggcgaaagtcagccagccaagcagcgggctaaagagcgccaggctgaaatattgcgcgctgttaaagatggcggaggcagtaccacgttctttcgtcgggaaccaggcggcgacaattcgggcgttcgccgggaaacttggcgcttcgctgaagccgagcataaagcgcataaagaacatggagatccctgcccaggccagcgggaacatatcaacaaagccttgcaggaaggtgaataggctccagaaaaagaggctgtaggtgtaaacttttttgctgccaaacttatcaagcagccagccgccggggatttgcatcagcaagtaggcccagccaaaagcggagaagatgtaacccatgctaaccgcacttaactgcaactcttttgccacttcggtaccagcaatagacagcgttgcacgatcggcgtagttaacggcggtaacaataaaaataatcagtaatattaaatagcgggtatgcacgcctttctttttttcgtcaacggtgtccagaatcattttatttacctcgggtacttatgctgatttttattattatggggaaggtgttatttatgagtttcatttatgccgtaacgacaatgaactcgggaattagtataagcagcgcgagaataataatcattgtgcaaatgctaatttaattaatactatttaaatattattttgagcatatgcacataaggttgcgcgctaaagcacagatttgcgctttaccttaccgggcggcactgcaatccctgaaatgattgacattgatcacatttctgcgtttaaactcctgacattcttatttcacccaatgaagtcatttatttttaaatgagaccaggtcctcattttaataacccctggctggagaatattgcacaatggccaacatcgaaatcagacaagaaacgccaactgcgttttatataaaagttcacgacacagataatgtggcaattattgttaatgataatggcctgaaagcaggaacgcgttttccggatgggctggaattaattgaacatattccccaggggcataaagtcgcattgctggacattccggctaatggtgaaattattcgttatggcgaagtgattggttacgccgtgcgtgcaatcccacgcggaagctggatcgacgaaagcatggttgtactaccggaagcgccgccgttacacacgctgccactggcaaccaaagtcccggaacccttaccgccgctggaaggatacacctttgagggctatcgcaatgccgatggcagcgtgggcaccaaaaacctgctcggtatcaccaccagcgtccactgtgtggcaggcgtggtggactatgtagtaaaaatcattgaacgcgatctgctaccgaaatacccgaacgtcgatggcgtggtggggctgaatcatttgtacggttgtggcgtggcgattaacgcaccggcggcagttgtacctatccgtaccattcacaatattagcctgaatcctaactttggcggcgaagtaatggtgattggcctgggttgtgaaaagttgcagcctgagcgcctgctgactggaacggatgatgtgcaagctattccagtagaaagcgccagcattgtcagtttgcaggatgaaaagcatgtcggttttcagtccatggtcgaggatattttgcagatcgccgaacgccatctacaaaaactgaatcaacggcagcgagaaacctgcccggctagtgaactggtcgttggtatgcagtgcggtggcagcgatgcgttttctggtgtaacggcaaacccggcggttggctatgcgtctgatctactggtgcgctgcggcgcaacggtgatgtttagtgaagtaacggaagtgcgtgacgcgatccatctgctgacaccacgcgcagtgaacgaagaggtcggcaaacggctgctggaggagatggagtggtacgataactatctcaatatgggaaaaaccgaccgcagcgccaaccctagcccgggcaacaagaaaggcggtctggcaaacgtggtagagaaggcactcggctccattgctaaaagcggtaaaagcgcaattgttgaagtgctgagccccggtcaacgcccgactaaacgcggattaatttacgccgcgacgccagccagcgattttgtctgtggcacgcaacaggtggctagcggtatcacagtgcaagtgtttacgaccggtcgtggtacgccgtacggcctgatggcggtacccgtcattaaaatggcaacccgcaccgagctggcgaaccgctggtttgatttaatggatattaatgcgggcaccatcgctaccggcgaagaaactattgaagaggtgggctggaagttgttccactttattctcgacgtcgccagcgggaagaagaaaaccttcagcgatcaatgggggctgcataaccagctggcggtgtttaacccggcaccggtgacctgatttcttttggaacgtccctcgcaaaacatggccttagtgccatgtttttattgtttaaagcccccacgtccattaataatgcatttgcattaccttagttcaagcttataatttgagcagaaaacaggctgtaaaaggacagtgaatcatgcccgctaatgctcgctctcacgctgtactgaccactgaaagtaaggtcacgatacgcggacaaacaactatccccgcgccagtgcgtgaggccttaaaactgaagccaggccaggacagcattcattacgaaattctgcctggtgggcaagtatttatgtgccgactgggagatgaacaggaggatcatactatgaatgcatttttgcgttttctggatgcagatatccagaacaacccgcaaaaaactcgtccattcaacattcaacaaggaaagaaacttgtcgctggcatggacgtcaacattgatgatgagattggcgacgacgaataatggattttccacaaagggttaatggttgggcgctatatgctcatccctgttttcaggaaacctacgacgctttagttgccgaagtcgagacattaaagggaaaagatcctgaaaattatcagagaaaagccgccacaaagttattggcggtagtccataaagtgattgaggagcatatcacggtcaatccaagtagtccggcattccgtcatggcaagagcttaggctctgggaaaaataaagactggagtcgggtaaaatttggtgctggtcgttatcgtctcttctttcgttatagtgaaaaagagaaagtcatcattctgggatggatgaacgatgaaaacactctgcgcacctacggtaaaaaaacagatgcctataccgtattcagcaaaatgttaaaaagaggacatcctcctgccgactgggaaaccctcacccgagaaacagaagaaacccattgatggtgttcacaatgcccgccgaacgcattcgtgttgaccagcgggcatcctttctcactccccgaccagaatcacttcaaccccagcctttcgcagtccttccaggctatccgcaggaatgccttcatcaacaatgatcatgtcgatacgttgagtatcaatgatcttatgtaaactggaacgattgaacttactggaatcggtgaccacgatgatccgttccgcaacttcgcacatccgacggtttaaacgagcttcatcttcattatgtgtgctgacgccgcgctccagatcgatcgcatctacaccaagaaacagcatatcgaagtggtaattttgcaggctttgctcagcctgatcgccgtaaaaagattggctctgacggcgcaaatgcccgccggtcatcagcagctcaacgccttccgcttccagcaacgcattagccacgttcataccgttggtcatcgcaattacgtcagtgtgcttgcgcatcagacgagcaatctcaaaagtggtggtcccggaatcgaggataacccgatgacctggctgaatcaactcaacggcagctttcgcaacgctgcgtttcatcgcggtgttcagtgcgcttttatcttccacacttggctcgacactcggcgtcgtgctatcgcagatcaacgcgccaccataggcacgcacagcgatcccctgcttttccagaaacgccagatcgttgcggatcgtcacagtagatacgccatacaatgcgctcagatcgttaacctgcacactcccttgctgtcgcagacgctgaatgatctgttctcgtcgctcgctggtgccagtcactcgcttctcaccactagcgtcggtattactcatagtaagtcctttcgtaaaactttcgtttcatttcgttttgcctattaacgcctttctattaagcaaatgcaagcccaccttgcccattgacgcaagctactctcgtttcagtgactttcattatgtttcttttgtgaatcagatcagaaaaccattatctttcgttttatttttatctcaccatgacgcagtatcaactgaaacaaaacgaaagattaatatcgcagtaatctgaactggagaggaaagtgaaacatctgacagaaatggtgagacagcacaaagcgggcaaaacaaatggaatttatgccgtttgttccgcacatccgctggtgctggaagctgcaatccgctacgccagtgcaaaccaaacgccgttactgattgaagcaacctccaatcaggtagaccagttcggcggttataccggaatgacgcccgccgattttcgcggctttgtttgtcagctcgccgacagcttgaatttcccgcaggatgcgttgattctgggtggtgaccatctggggccaaaccgctggcaaaacctgccggccgctcaggcaatggccaatgccgatgatttgattaaaagctacgttgcggcaggattcaaaaaaatccaccttgattgcagcatgtcctgtcaggacgatccgattcccttaactgatgacatcgtggctgaacgcgccgcccgtctggcgaaagtggcggaagaaacctgtcttgaacactttggcgaagccgatctggagtatgtcattggtaccgaagtgccggtacctggcggcgcgcatgaaaccttaagcgagctggcggtcaccacgccggatgccgcccgcgccacgctggaagcccatcgtcacgcctttgaaaagcaaggtttgaatgccatctggccacgcatcattgccctggtggttcaacccggcgtcgaattcgatcacaccaacgttattgattatcagcccgccaaagcgagcgccttaagccagatggtcgaaaactacgaaacgctgattttcgaagcgcactctaccgattatcaaacgccgcaaagcctgcgccagctggtgattgaccactttgccattctgaaagttggcccagcgctgaccttcgccctgcgtgaagctctgttctctctggcggcgattgaagaagaactggtgccagcgaaagcctgttctggtctgcgtcaggtgctggaagacgtgatgctcgaccgcccggaatactggcaaagccactaccacggtgacggcaacgcgcgtcgtctggcgcgtggttatagctacagcgatcgcgtgcgctattactggccggacagccagattgatgacgctttcgctcatctggtacgtaatctggcggatagtccaattccgctgccgctgatcagccagtatctgccgctgcagtacgtgaaagttcgctccggcgagctgcagccaacgccacgggaactcattatcaaccatattcaggacatcctggcgcagtaccacacagcctgtgaaggccaataagcaaaacaaagaggaacacgctatgccaaatattgttttaagccggattgatgaacgcttgattcacggtcaggtcggcgttcaatgggtcggatttgcgggggcaaatctggtgctggtagccaacgatgaggttgccgaagatccggtacaacaaaacctgatggaaatggtactggcagaagggatcgccgtacgtttctggacgctgcaaaaagttatcgacaacattcatcgcgccgccgatcgacagaaaatcctgctggtttgtaaaacacccgccgatttcctgacgctggtgaaaggtggcgttccggtgaatcgcattaacgttggcaatatgcactacgccaatggcaaacaacaaatcgccaaaacggtttctgtggatgcgggcgatatcgcagcatttaacgacctgaaaaccgctggggtggaatgcttcgttcagggcgtcccgacagagcctgctgtggacctctttaaattactttgagggattcatcatggaaatcagcctgttgcaggcatttgcgttgggcattatcgcctttatcgctggcctggatatgtttaacggcctaacccatatgcaccgcccggtggtcctcggcccgttggtcgggctggtacttggcgatctgcataccggaattttaaccggcggtacgctggaactggtgtggatggggctggccccgctggcgggcgcacagccgcctaacgtgattatcggtactatcgtcggcacggcgtttgccattactactggcgtgaaacccgatgtcgcagtaggtgtcgccgtacctttcgctgtcgcagtacagatggggattaccttcctgttcagcgtgatgtccggcgtgatgtctcgctgcgacctggcaacaaacccgcgccgcatttgatgctggtgccgacggcctggtgcattgctataacgggatgacaggtttacatcaccgcgaaccgggaatggttggcgcgggattaacggacaagcgcgcctggctggaactgatagccgatggtcatcatgtgcatccggcggcaatgagcctgtgttgttgctgtgcgaaagagagaatcgtactgatcaccgacgcgatgcaggcagctgggatgccggatggtcgctatacgttatgtggtgaagaagtgcagatgcacggtggcgttgtccgtaccgcgtctggtgggctggcgggcagtacgctgtctgttgatgcggcagtgcgcaatatggtcgagttgacgggcgtaacgcctgcggaagccatccatatggcgagcctgcatccggcgcgaatgctgggtgttgatggtgttctgggaagccttaaaccgggcaaacgcgccagcgtcgttgcgctggatagcgggctacatgtgcaacaaatctggattcagggtcaattagctagcttttgatagtttgctcctttattgggccttcacttcccccgtaaggcctttctttttctttcgttttgatctgtgcagcggtgtcggatgcgacgctaacgcgtcttatccgacctacagttggtgaccgcaaggccggataaagcgtttgcgccgcatccagcaatcccttttgcttcctttatcttttctttcaacgatcacaaatttcgttttatttcttttttctccattgaactttcagtttcttttctatagattttaatcaacgaaagacatcaccaagtgaaatgaaacgaaaggcaagtgaaagcgacaacgcccgacgtcaagttcatcagactaaggattgagttatgccagaaaattacacccctgctgccgccgcaaccggtacatggactgaagaagagatccgccatcagcctcgcgcatggatccgtagtctcaccaacatcgacgcgctacgttccgcgctcaataacttccttgaaccgttactgcgcaaagagaatctgcggatcatcctgaccggagccggaacgagcgcatttatcggtgacatcatcgcgccgtggctcgccagccataccggtaaaaacttcagcgccgtaccgaccaccgatctggtcaccaatccgatggactacctgaacccagctcatccgctgctgttgatctccttcggtcgatccggcaacagcccggaaagcgtcgcagccgtggaactggcaaatcaatttgtaccggaatgctatcacctgccgatcacctgcaacgaagcgggcgctctttaccaaaacgcgatcaacagcgataacgcgtttgccctgctgatgcccgcagaaacgcacgatcgcggctttgcgatgaccagcagcattaccaccatgatggccagctgcctcgcggttttcgcacctgagacgatcaacagccaaaccttccgcgacgtggcggatcgttgccaggcgatcctgaccagtctgggcgatttcagcgaaggtgtgtttggttacgcaccgtggaaacggatcgtttatctcggtagcggtggcttacagggcgcagcacgcgagagcgcgctgaaagtgctggaactgacggcgggtaaactggcggccttttatgattctccaaccggattccgtcatggaccaaaaagcctggtcgatgacgaaacgctggtggtggtatttgtctccagccacccttacacccgtcagtatgatcttgatctgctggctgaacttcgccgtgacaaccaggcaatgcgtgtaatcgccatcgccgcggaaagcagcgacatcgtcgctgccggtccacatatcatcctgccaccgagtcgtcactttatcgacgttgagcaggcattttgcttcctgatgtacgcccagacgtttgcactgatgcagagcctgcacatgggcaatacgccggataccccaagtgccagtggcaccgttaaccgcgtggtgcaaggcgtaatcattcatccgtggcaggcataagaggatcgcattatgagcattatctccactaaatatctgttacaggacgcccaggccaatggctacgcggtgcctgcttttaacattcataacgccgagacgatccaagcgatcctcgaagtgtgcagtgaaatgcgaagcccggtgatcctcgccggaacgccggggacctttaaacacatcgcgctggaagagatctacgccctgtgtagcgcctattccacaacctacaacatgccactggcgctgcatctcgaccaccacgaaagcctggatgatattcgccgtaaagtccacgcaggtgtgcgcagtgcgatgatcgacggcagccacttcccgtttgccgagaacgtgaagctggtgaaaagcgttgttgacttctgccacagtcaagattgcagcgtggaagcagaactgggccgcctgggcggtgttgaagatgacatgagcgttgacgccgaaagtgcattcctgaccgatccacaagaagctaaacgctttgtcgaactgactggcgtcgacagcctggcggtagcgattggtacggcgcacggcttatacagcaaaacgccgaagattgatttccagcggctggcggaaattcgtgaagtggtggatgttcctctggtgctgcatggtgccagcgatgttccggatgaatttgtccgtcgcactattgaacttggcgtcacaaaagtgaacgttgccacagaattaaaaatagccttcgctggcgcggttaaagcctggtttgcggaaaatccgcagggtaacgatcctcgttattatatgcgcgtcggaatggatgcgatgaaagaagttgtcagaaataaaattaatgtctgtggtagtgcgaatcgaattagtgcataatcattagttttttatgatttatcccaatgtacttcccgattaatatcggggagtgccttaatggaaaaggagataactaaaccttaataaatacatcactacaatatcgcaacaataatatatttaaaaaaattatattattcaactttatggtgaggattacacaatgaccagtccaaatattctcttaacccgtattgataaccgtctggttcacggtcaggttggcgtgacctggacatccaccatcggtgcaaatctgctggtagtcgtggatgatgttgtcgctaacgatgatattcaacagaaattaatgggtattaccgcggaaacctacggctttggcattcgtttctttactatcgaaaaaaccattaacgtcatcggcaaagctgcaccacatcagaagatcttcctgatttgccgtacgccacaaacggtacgtaaattggtagaaggtggtattgacctgaaagatgtcaacgtcggcaatatgcatttcagcgaagggaaaaagcaaatcagcagtaaagtttatgtcgatgaccaggatctcacggacttacgttttattaaacaacgtggcgtgaatgttttcattcaggacgtccctggcgatcaaaaagaacaaatccctgactaaatctaaaatcgccttaatattggtttgaggtaataaaaatgcatgaaataaccctacttcagggattatccctggcggcgttagtttttgttctggggattgatttttggctggaagccttatttttattccgcccgataatcgtttgtaccctaactggcgctattctcggtgatattcagactggcttaattaccggtggtctgacagagttggctttcgccggattaacccctgcaggtggtgttcagccgcccaacccgattatggcgggtctgatgaccaccgtcattgcatggtctacgggcgttgatgccaaaacagcaattggtcttggcctgccgtttagtttgttaatgcagtacgtcattctgttcttctattccgctttcagtttatttatgaccaaagccgataaatgcgcgaaagaggcggatacggcagcgttttcccggcttaactggacaacgatgctcatcgtcgctagtgcgtatgcggtgattgctttcctctgtacttacctggcacagggggcgatgcaggcgctggtgaaagcgatgcccgcctggctgacccacggctttgaagtggctggcggtattctgcctgccgttggttttggcttgctgctgcgcgtaatgttcaaagcgcaatatatcccttacctgatcgccggtttcctgtttgtttgctacatccaggtcagcaacctgttgccggttgccgtactgggcgcaggctttgcggtgtatgagtttttcaatgcgaaatcccggcagcaagcgcaaccgcagcccgttgccagtaaaaatgaagaagaggactacagcaatgggatctgaaatcagtaaaaaagatatcacccgtctgggctttcgtagcagcctgctgcaagcgagctttaactacgaaaggatgcaggcgggcggttttacctgggcgatgttgccgatcctgaaaaagatttataaggacgacaaaccgggcttaagcgcggcgatgaaagataacctcgaatttattaatacccacccgaatctggtcggattcctgatggggttattaattagcatggaagaaaaaggagaaaaccgcgacaccattaaaggcctcaaagtggcactgtttggcccaatcgccgggattggcgatgcgattttctggtttactttgttgccgattatggcgggaatttgcagtagttttgccagccagggaaacctgctggggccgattctatttttcgccgtttacctgcttatctttttcctgcgcgtcggctggacccacgtcggttatagtgtcggcgtgaaggcgatcgataaagtgcgagagaacagccagatgattgcccgtagcgcaaccatcctcgggatcacggtaatcggcgggctgatcgctagctatgtgcatattaacgtggtgacaagctttgccatcgacaatacccacagcgttgcgctgcagcaggatttcttcgataaagtcttcccgaacattttaccgatggcctacaccctgctgatgtattacttcctgcgggtgaaaaaagcgcatccggtgctgttaatcggcgtgacttttgtgctctctattgtttgttccgcattcggcattttgtaaatggaacgaggcactgcgtctggtggtgcctctttacttaaggaatttcatcctgtgcaaacccttcagcaagttgaaaactatacggcgttaagtgaacgtgccagcgaatatttattggccgtgatccgtagcaaaccgaatgccgtgatttgcctggcgaccggagccacgccattactgacgtatcattatctggtagaaaaaatccaccagcagcaggttgatgtcagccagctcaccttcgtgaagctcgacgaatgggtggatctgccattaacgatgccaggcacctgcgaaactttcctgcaacagcatatcgtgcagccgctggggctacgtgaagaccagctcatcagctttcgctccgaagagataaatgagacagagtgcgaacgggtaacgaacctgattgcgcgcaaaggcggtctggatttatgcgttctcggattggggaaaaacggtcatcttgggctgaacgaaccgggagaaagcctgcaaccggcctgccatatcagtcaacttgatgccagaacacagcaacatgagatgttaaaaaccgcgggtcgccccgtgactcgtgggatcaccttaggcctgaaggatattctcaatgcccgcgaagttttgttactggtgactggcgaaggaaagcaggatgcgacagatcgttttctcacggctaaagtctctaccgctatcccggctagttttttatggctgcacagtaactttatttgtttaattaacacctaaccagatgaaaaatttgctcaaaatgtttaaattaacttatgtaacagtcacgcattatattaaataacatttgactgggttgaacataacgccgatagcaaaaggagttatgttcaacaatttaattttagatatacatataacttgttctattaataaatcacctcgtattctgactcgccccctggcgcagcaaagtcaggcatttatactcttttgaatacatagaaaattgatatcaatataatgaaaatatcaaatatttgcatataaatataatcttaaagttcagtctatttaatgttcaatgaaatatttctgcctgtataatctttaaagatgttgaacatatattcacattaaatatgattatgtacttgttacaaggataaggttatatatgaataaagttacaaaaacagctattgcgggcttacttgcgcttttcgcaggtaatgccgctgcaaccgatggtgaaatagtttttgatggcgagattttaaaatccgcttgtgaaatcaatgactctgataagaaaattgaagttgctcttggtcactataatgccgaacagtttcgtaatattggcgagcgtagcccaaaaattccattcactattcctttagttaactgcccaatgactgggtgggagcacgataacggcaacgttgaagcgtctttccgtctatggctggaaacgcgagataatggcaccgtccctaacttccctaatctggcaaaagtaggctcttttgctggcatagcggcaacaggtgtgggtatccgtattgacgatgcggaaagcggaaacattatgccactgaatgctatgggcaatgataacacggtttatcagatcccggcggaatccaatggtattgtcaatgttgacctcatcgcttactacgtaagtaccgtagttccaagtgaaatcaccccaggggaagcagacgctatcgttaacgtaacgctggattaccgttaatacgttagggcgttatctgacctgtcagataacgcccttttccttcctctttctcgttgtatcaggttgaaaaataactatgagtaaacgaacattcgcggtgatattaaccttgttgtgtagcttctgtattggccaggcgcttgcaggaggaatcgttttacagcgaacgcgagtgatctatgatgccagccgcaaagaggctgcgttacctgtcgcaaacaaaggcgcagaaacgccttatttactgcaaagttgggtagataatatagatggtaaaagccgtgccccatttattataaccccaccgctatttcgtcttgaggctggcgatgacagtagtctgcgaattattaaaacagctgataacctgcctgaaaataaagagagcctgttctacattaatgttcgtgccattccagcaaagaaaaaaagtgatgatgttaatgctaacgagttgacgctggtatttaaaacacggatcaaaatgttttatcgccccgcacacctgaagggacgggtaaacgatgcgtggaaaagtctggaatttaaacgtagtgaccatagtctcaatatatataacccaactgaatattacgtcgtatttgccggactggcagtcgataaaaccgatctcacaagcaaaattgaatatatcgcgcccggagaacataaacagttaccacttcctgcatctggcggaaagaacgtgaaatgggctgcgatcaatgattatggcggcagttccgggacagaaactcgtccactgcaataaaaaatataaaaacacaggtcatcagggaatgccacaacgacaccaccagggacataaacgcacaccgaaacagttggcgctcatcatcaaacgttgtttgccgatggtgctcactggcagcggcatgctttgcactaccgctaacgccgaagagtattatttcgaccccattatgctggaaaccacaaaaagtggtatgcaaacaaccgatctgagccgttttagtaaaaaatatgcacaactaccaggaacttatcaggttgatatctggctgaataaaaagaaggttagtcagaaaaaaattacatttaccgccaatgcagagcaacttctgcagccacagtttacggtagaacaactacgtgagctgggtattaaggtggatgaaatcccggcgctggctgaaaaagatgacgatagcgtgatcaacagccttgaacaaatcattcccggtacagctgctgaatttgatttcaatcatcagcaacttaatttgagcattccccaaattgcactgtaccgtgatgcaagaggttacgtctccccttctcgttgggacgatggtataccaacgctgtttaccaactacagctttacaggttctgataaccgttaccgccagggcaatcgtagccaacgacagtacctgaatatgcaaaatggtgctaattttggcccctggcgattacgcaactattccacatggacacgcaacgatcagacaagtagctggaataccatcagtagttatttacaacgtgatatcaaggcgttgaagtctcagttgcttctgggagaaagcgccaccagcggcagtattttttccagctacacctttactggcgtgcaactcgcttccgacgataatatgttgccaaacagccagcgcggatttgccccaacggtacgcggtatcgcaaacagtagtgcaatcgtgactatcaggcaaaatggttatgtgatctatcaaagcaacgtgagtgcgggtgcctttgaaattaacgatctctacccctcttccaacagcggcgatttagaagtcacgattgaagaaagtgacggtacacaacgtcgctttatccagccttattctagtttacccatgatgcagcgacctgggcatctaaagtatagcgcgaccgctggacgctatcgcgctgatgcaaacagtgatagcaaggaacccgaatttgctgaagccacggcaatatatggtttgaataatacttttacgctgtatggcggcctgctcggttctgaagattattatgcgctggggatcggtatcggcggcacacttggcgcactgggcgcgttgagcatggatatcaacagagctgacacccaattcgataaccagcactcttttcatggctatcaatggcgtacgcagtacatcaaagatatcccggaaaccaacaccaatatcgctgtcagctactatcgctataccaacgatggctattttagttttaatgaagccaatacccgcaattgggactataacagtcgccaaaaaagtgaaattcaattcaacatcagccagacaatatttgatggggtaagtctgtatgcctccggtagccagcaagactattggggcaataacgataaaaacaggaatatctctgttggggtttccggccagcaatggggagttggttacagcctgaattatcaatacagccgctacactgatcaaaataatgaccgcgcactctctttgaatctcagtattccgttagaacgctggttaccgcgtagccgggtttcctatcagatgaccagccagaaagatcgcccaacccaacatgaaatgcgtcttgatggcagtctgctggatgatggtcgcctgagctatagcctggaacaaagtctggatgacgataacaaccataacagtagcctgaacgccagttaccgtagtccttatggcaccttcagtgccggatacagctacggtaatgacagcagccaatacaattacggcgttaccggcggcgtggttatccatcctcatggcgtgacgctcagccaatatctgggcaacgcttttgcgcttatcgatgctaacggagcatctggcgtgaggatacaaaactatccggggattgctaccgatccttttggctatgcagtggttccttatctcacaacttatcaggaaaaccgtctcagcgtagatactacgcagctgcccgataacgtcgatcttgaacaaacaacacagtttgtggtgcccaacagaggtgcaatggtagcggcgcgtttcaacgccaatatcggttatcgcgtacttgttacagtcagcgatcgcaacggtaaaccgttgccctttggcgctcttgccagcaacgatgatacggggcaacaaagtatcgtcgatgagggcggcatactatatctctctgggataagcagtaaaagtcaaagctggactgtacgctggggaaatcaggcagatcaacaatgtcagtttgctttcagtacaccggatagtgaacctacaacctctgtattacaaggcacagcgcagtgccattaaggataaaaaaatgaaaagagcgcctcttataacaggtcttttgttgatatccacatcctgcgcttatgcctccagtggagggtgtggagccgacagcactagcggtgcgacaaattacagcagtgtggttgatgatgttacggtgaaccagacagataacgtgacaggacgggagtttacctctgcaacgctaagtagcactaactggcaatacgcctgttcctgctctgcgggtaaggcagttaaacttgtctatatggtcagccccgtacttaccaccactggacatcagacaggatattacaaactcaatgacagcctggatattaaaaccacattacaggcaaacgacattccaggactcacaaccgaccaggttgtctctgttaacacccgattcacacagataaaaaacaacacggtatattctgctgcaacccaaacgggtgtttgccagggtgatacgtctcgttatggacccgttaatattggtgcgaacaccacctttaccctgtatgtcaccaagccatttctcggcagcatgaccattccgaaaacggatattgccgtcattaaaggcgcgtgggtcgatggaatgggaagcccgtctacaggtgacttccatgatttagtcaagttaagcattcagggaaatctcaccgccccacagagctgcaaaattaatcagggcgatgttattaaggttaattttggattcatcaatggtcagaagtttaccacccgcaatgccatgccagacggttttactccagtagactttgatatcacttatgactgtggtgatactagtaagattaaaaacagcttgcaaatgcgcatcgacggtacaactggggtagtagaccagtacaacctggtcgccaggcgaagaagtagtgacaatgtgcccgatgtcggtattcgtattgaaaatctcggcggcggagttgcaaatattccttttcagaacggtatccttcccgttaatccttccgggcatggcaccgtcaatatgcgcgcctggccagttaatctggtcggtggtgagctggaaacaggaaaatttcagggcacagccaccattaccgtcatcgtgcggtaaaagaagacgttgcgttttgattaacgcaacgcttcggcactgttacccctgctgctccagcgcatacttatacagcgcatttttcttcacgccgtgaatttctgcggccagcgccgccgcttttttcagcggcagttctgcctgtagcagcgccagcgtgcgcagggcatcggcgggtaagtcttcttcctgtgctttatgaccttcgacaatcagcaccatttcgcctttgcgacggttttcatcttcctttacccacgccagcagctcgccaacgggcgcgccgtgaatggtttcccaggttttggtcagctcacgcgccagaaccacgtagcgggattcgcctaataccgcaacgatatcttccaggctatctaacagacggtgggtagattcataaaaaatcagcgtgcgcggctccgcttcaatggcttttagcgcatcacggcggcctttacttttggcaggtaaaaagccttcgtaacagaaacggtcagagggtaaacccgctgcgcttaacgcagtgatagcagcacacggcccgggtagcggcaccacgcggatccccgcttcacggcaggtacgcaccagatggtagccaggatcgttaattagcggcgttccggcatcggaaaccagcgcaatgttttgcccctcttgcagcttcgccagcagcgtttcagctttttgttgttcgttatggtcgtgcagcgcaaacaaccgggcattaatcccaaaatgttgcagcaataaaccggtgtgacgagtatcctcggcggcaatcagatcaacggcctgtaatacctctaacgcacgctgggtgatatccgccagattgccgattggcgtcggtacaatgtaaagctggccctgagaattatccgcgctttggtgttgtttcattgtgtcgtccgtattgccgatttaatattgagcattgcgtaaaaaaaatatcactggatacattatggtacccagtacattttctcgtttgaaagccgcgcgttgtctgcctgttgttctggcagccctgattttcgccggttgtggcacccatactcccgatcagtccactgcttatatgcagggcacggcgcaggctgattctgccttttatcttcagcagatgcagcaaagctctgatgataccaggatcaactggcaattactcgccattcgtgcactggtgaaagaaggtaaaaccgggcaggcggttgagttgtttaaccaactaccgcaagaactgaacgatgctcagcgtcgcgagaaaacactgctggcggtagagattaaactggcgcagaaagattttgctggcgcgcaaaacttgctggcgaaaatcacacctgccgatttagaacaaaaccagcaagcgcgttactggcaggcaaaaatcgatgccagccaggggcgtccttccattgatttactgcgcgcgttaattgctcaggaaccgctgcttggcgcgaaagaaaaacagcagaatattgatgccacctggcaggcgctctcctccatgactcaggaacaggcgaatacgctggtgatcaacgccgacgaaaatattctgcaaggctggctggatctgcagcgcgtctggtttgataaccgtaacgatcccgacatgatgaaagccgggatcgccgactggcagaaacgttatccgaacaatccgggcgcgaaaatgctgccaacgcagttggttaacgtaaaagcgtttaaaccagccagcaccaacaaaatcgccctgctgttgccactgaatggccaggcagcggtatttggtcgcactattcagcaaggctttgaagcggcgaaaaatatcggcactcagccagtggcagctcaggtagctgccgcacctgccgcagacgtagctgaacaacctcagccgcaaaccgtggatggcgttgccagcccggcacaagccagcgttagcgatctgaccggtgaacagcctgcagcccagccggtgcctgtaagcgccccggcgacaagcaccgcagcggtaagcgcacccgcaaatccatccgcagagctgaaaatctacgataccagtagtcaaccacttagccagatcttaagccaggttcagcaggatggcgcgagtattgtggtcggtccgttgctgaaaaataacgttgaagagttgctgaagagcaacactccgctgaacgtactggcactgaaccagccggagaatatcgaaaatcgcgtcaatatttgttacttcgcgcttagtccggaagacgaagcgcgcgatgcagcgcgtcatattcgtgaccagggtaaacaagcgccgctggtgctgatcccacgcagtagtttgggcgatcgcgtagccaatgcgtttgcgcaagagtggcagaaactgggcggcggcaccgttctgcaacaaaaatttggttccaccagcgaattacgcgcgggtgttaacggcggttctggtattgctttaacgggtagcccgattactctcagagcgacaaccgactccggcatgacgaccaacaatccaacgctgcaaaccacgccaaccgatgaccagttcaccaataatggcggtcgtgtcgatgcggtgtacattgtggcaacgccgggtgaaatcgcttttatcaaaccgatgatcgccatgcgtaacggtagccagagcggtgcaacgctgtacgccagctcccgcagtgcgcaagggaccgctggcccggatttccgactggagatggaaggcttgcagtacagcgaaatcccgatgctggcaggcggtaatctaccgttaatgcagcaggcactcagcgcggtgaataacgattatagtctggctcgcatgtatgcgatgggcgtcgatgcctggagcctggcaaatcatttcagtcaaatgcgccaggttcagggttttgaaatcaacggtaataccggaagcctgacggctaacccggattgcgtgattaacaggaacttaagttggctacagtaccaacaaggtcaggtagtccccgtcagttaaattaagtgattaacaggaacttatcatggctacagtaccaacaaggagtggtagtccccgtcagttaaccaccaaacagaccggcgatgcgtgggaagcacaagcgcgtcgctggctggaaggcaaaggactgcggtttatcgccgctaacgtgaacgagcgtggcggcgagatcgatctgataatgcgtgaaggccggaccaccatttttgtcgaggtacgctatcgccgctctgcgctttatggcggcgcggcagccagtgtgacccgcagcaaacaacacaaattattacagactgcccgcttgtggctcgcgcgtcataatgggagttttgatactgtggattgccggttcgatgtggtagccttcaccgggaatgaggttgagtggattaaggatgcctttaatgaccacagttaattaaggtttaaggattagcgtgcaagaaagaattaaagcttgcttcactgaaagcattcaaactcaaattgcggcggcagaggcgcttccggatgccatctcccgtgcagccatgacgctggttcagtctctgctcaatggcaacaaaatcctctgttgtggtaatggaacttccgctgccaatgcacagcattttgctgccagcatgatcaaccgtttcgaaacggagcggcccagcttacctgccattgcactaaatactgataatgttgtcttaacggcgattgccaacgatcgcttacatgatgaagtgtatgcaaaacaggtgcgggcgctgggtcatgcgggagatgtattgttagccatttccacccgtggcaacagccgcgatattgttaaagcagttgaagccgccgttacgcgtgatatgaccattgtggcattgaccggctatgacggcggcgaacttgcaggtttgttagggccacaggatgtggagatccgcattcctagccatcgtagtgctcgcattcaggaaatgcatatgctgacggtaaattgcctgtgcgatctgatcgataacacgcttttccctcaccaggatgattaaggagaatacatgaaggcattaagcccaatcgcagtccttatttccgcgctgctgttgcaaggttgtgttgccgctgccgtagtgggtaccgctgctgtgggtaccaaagccgcaactgacccacgcagtgtcggcacccaggtggacgatggtaccctggaagtgcgcgtgaacagcgcattgagcaaagacgaacagattaagaaagaagcgcgcattaatgtaacggcctatcagggcaaagtgctgctggttgggcagagtccaaatgctgaacttagcgctcgcgccaaacagattgctatgggcgtagacggtgccaacgaagtgtataacgagattcgtcagggccagccgattggtctgggcgaagcatctaacgatacgtggatcaccaccaaagtgcgtagccagctcttaaccagcgacctggtgaaaagctccaacgtgaaagtgaccaccgaaaacggtgaagtgttcctgatggggctggtgactgaacgtgaagcgaaagcggcggcagatattgccagccgggtgagcggcgtgaagcgggtaactacggcgtttacgtttattaaataacagccccttgtaatgcctgatgcgacgcttgccgcgtcttatcaggcctacaacgatacaaaccgtaggtcagataaggcgtttacgccgcatccgacatgttttccctcaaatcagaacaacagcgccagcccgccgacaatcacaccagacactgccaccatcgcccctgtcagccataaggctttcgccgggaacgctttgcgcagcataatcagactcggcaaactcactgccgggagcgtcatcaacaatgccagcgccggagcggttcccatacctgccagcatcatcgtttgtacaatcggaatttctgctgccgtgggaatgacaaacaagcatcctgctaccgccatcgccaccacccacatcaggctgttatcgacagcaccatcggcatgggggaataaccagacgcgagcggcacccaacaccagtactgcaaggatgtaaaccgggatcgtactccagaaaagcgtccatagcgccctgccccagcggctaaaaaacccgccctgtgcttccggtatgtcaatttcgaccggtgcctgcgtttgcggtgtttcacgcacccatttttgcaccagcgtcgcaatcagcaacaccatcaccagcccggccaccagacgaatcgccgcaaaaccccagccgaggacaaagcccataaacaccagcgtcgccgggtttaacaccggattgcccatccagaatgccagcgcaccgcccatgctcacctgttggcgacgcattcccgccgcgaccggagccgcacagcaggtacacatcatgcccggcaagctaaacagcgttcccagcagcgtgccgcgaaagcggctttgcccaagcgtacgcaacaaccagtcacgcgggatcagcacctgaatcaagctaccgaggatcacccccagcaccgccgctttccataccgcgaggaaatagatcatcgcgtaatccaacgccgcctgccatgggttagcatccgcctgcgcaaggatagatttaccgatactgtgggtttcggcagcagtaaacgctttgccgtagtaaggttcccatttcacataccagagaccggcaatgacaacgagaaagaaaagcgcgggtttccaccactgaatgggcgttgccgcctgagaactagactgaccagtcatagcattccccaggaataagttatgataattgagcgcgtgaatattacgctcactatcaattcttgggaataattattcagctcttttgcgtaattcactagagcttaaaatcgtcacgccttcatgctcaggccgcatgctctctgccagcatgacccgcgccacgtctctcgcatcaatggatttccagttacctggtaacaaacggaacagcggcgcaaaaagcgtttcgttcatccgctgtttgctacgatcgcccagtaacatgctcgggcgagcaatggtcaatttcggccagttctgggcgattaatgcttcttccatctcccctttgacgcggttatagaaaaacgggctgtgggcattggcacccatcgcactgactaccaacatatgctgcgcgcccagtcgccgcccggttaatgcggtatccactaccagcgtgtaatcggcatgaataaacgcctctttgctccccgcttctcgccgcgtggtgccgagacaacaaaacacaatgtcgatgggatcggtgacctgcgccaacgcgtcactcagttgcggatcatggggattaaacaccccgggcatatcgcccaacggacgtcgcgtcggcgcagcaatggcgttaactttcggttcgttaatcaacatccgcagcaggtgaccgcccaccagccccgttgcgcctgtaatcagtacctgactcatcttcgctcctttacagaattgtctgccttgcgctccacggctcatgcaccaggcttaatagaccatgaggtaattatccccgattgtgggaaattcgcctcatccaatgcaacaacgcggaggaagcatgagtaagaaaattgccgttttaatcactgatgaatttgaggatagtgaatttactagtcccgcagacgagttccgtaaagccggacacgaagtgattaccattgaaaaacaagcgggtaaaacggtgaaaggcaaaaaaggagaagccagcgtgaccatcgataaatccatcgatgaagtgacgcctgcggagtttgatgccctgctgctaccgggcggccatagtccggattatctgcgtggggacaaccgttttgtcacctttacccgtgattttgtgaatagtggcaaaccggtgtttgccatctgtcacggcccgcagttgctgatcagcgccgatgtgattcgggggcgcaaactgaccgcagttaaaccgatcattattgatgttaaaaatgcgggcgcggaattttacgatcaggaagtcgtggttgataaagatcagctggttaccagccggacaccggacgatctgccagcgtttaaccgcgaggcgttacgcctgctcggtgcctgattacgcctgctcggtgccactgtcgcgtagccaaatcatttttttaccaaagcccagcgtgttgtcggtgaatttgatttcatcgagccggatttcccacaccggggcgctcagcattctggcaaccggaaagcgacgattgtacgccttgcgcgcgaggtcgctttcctcaccttccagcctgcggatctcacctttaaactgcacaccgcgaattaacgctaccgttttcggctgaccgtttaccgttccggcaaccgcagcctgcggcccactcatctgcgcgtggcgcgttttttcttccgtcaaaatgtagaaggcgactttctgcgcatcaaaaagataaaaggcattagcgcaccagagttccccttcctgctgcacacaccaagtgacaacatgttgttttgccagccaacggctgatggcgatgagtgtttccattgctgttctcttttatactgtgggcctgaccttaacatgcgacgcagacgatgacaccctggtttctttacttgatccgtaccgccgacaataagctttataccgggatcaccacggatgtcgaacgccgctatcagcagcaccaaagcggcaaaggggcgaaagcactgcgcgggaaaggagaactaacgctggtgttttccgcgccagtgggcgatcgtagcctggcgttacgggcggaatatcgcgttaagcaactgaccaaacggcaaaaagagcgtctggtagcggaaggcgcagggtttgcagagctgttaagcagtctgcaaaccccggagattaaaagcgattgaaatgctcgtgatactcaaccaggccggtaacgccattcagcgcgtcatccgctaaacgatgtacctggaaggcgctttcagtgcccggccagcggcaacgcagatcgtgatgcgccgccagttcaaagccgaaacgactgtacagcgccggatcgcccagcgtcaccactgcggcatagccgaactcattaaggctatcgagtccttcatagaccagttggcgtgccagcccctgtccacggtatttttcatcaaccgccaacggtgccatgccgacccattgcaggtcttcgccctgcacatcaaccggactaaatgccacatagccaatgacctgaccttcgtcatctgtcgccaccagccccagcgtcagaaagccatcttcacgcagatcgtgaaccagcttcgcttccgcatcactttcgaaactgcgacgcagcagggcatcaatacccggcgcatcaatgggaatttctactcgaattagcatggttcacctacgcttgtctgtttggtttcaggcgcggttttcattcccgcctcaacaaaatccgccagttgcagcagcatcatgcgtaaggctttcggcatttgctccagttcaatggcgtccatcaggtttttcacatacagccccagctccgtatcgccttcaatcaccagccgacgctggaagaagagcgtatccggatcttgtttacgcgccgcaatcatcagcagatcgctggcgtcggcactaaaactcacatcagcttgcgcgttctggctaacgaccagtttgccattcaccacgctggtaaaccattgcaggtcaatatcacgcacatgaatacttaaccagcggccttcaagaaactccagctcgccatcatccagcgcctggcggaattgccagcttaagacctgctcaagaacctggcgttttagcgcaaatggcgtcagttttaccggtacactcaacagagatggccccaaatgcacaatacgggaacgcagtttatccaacacgagttttactccctgtttcaacaatcatcctattttgccatatcagaaaaataacatagcggtataaatcaacaattccatatgaaattgctgctaccaccaatacaactttaactgccttaaatcaaaaattgtcgcagcaaggttaactaaaatcccagttcgttaacatttttgcgttttgatagcgcaaccttcaggaaaaattatggagctgctctgccctgccggaaatctcccggcgcttaaggcggccatcgaaaacggcgcagatgctgtttatatcgggctaaaagatgataccaatgcccgtcacttcgccggccttaactttaccgagaaaaaattgcaggaagcggtgagttttgtccatcaacatcgccgcaaacttcacatcgcgattaacacttttgcgcatccggacggttacgcccgttggcagcgcgccgtggatatggcggcgcagctgggtgccgacgcgctgatcctcgccgacctcgccatgctggagtacgccgccgagcgttatccgcatattgagcgccacgtaagcgtgcaggctagcgcgaccaatgaagaggcgattaacttttatcatcgccattttgacgttgctcgcgtggtgctgccgcgcgtgttgagcattcatcaggtgaaacaactggcacgggtcacacctgtaccactggaagtctttgctttcggcagcctgtgcattatgagcgaaggtcgttgctatctgagcagctatctgacgggtgagagccccaacaccataggcgcgtgttctccggcccgtttcgtgcgctggcaacaaacgccgcaggggctggaatcccgcctgaacgaagtgctgatcgaccgttatcaggacggcgaaaacgcaggttatccgacgctatgtaaagggcgttatctggtggacggcgagcgctatcacgcgctggaagaaccaaccagtctcaataccctggaactgctgccggagttaatggcggcgaatattgctagcgtgaaaattgaaggccgccagcgtagcccggcgtatgtcagccaggtggcgaaagtctggcgtcaggctatcgaccgttgtaaggccgatccgcaaaactttgtaccgcaaagcgcgtggatggagacgctcgggagcatgtccgaaggcacgcaaaccactcttggcgcatatcaccgtaaatggcagtgagaaaagcaatgaaatattccttagggccagtgctgtggtactggccaaaagagacgctggaagaattttatcagcaggccgccaccagcagcgccgacgtgatttatcttggtgaagcggtatgcagcaagcgtcgggcaaccaaagttggcgactggctggagatggcaaaaagcctcgccgggagtggtaagcagattgtgctctccacgctggcgctggtgcaggcaagttctgaactgggcgaactgaaacgctatgttgagaacggtgagtttctgattgaagccagcgatctcggcgtggtgaatatgtgcgctgaacgcaaactgccgttcgtcgccgggcacgcgctgaactgctacaacgcggtgacactgaaaatattgctcaaacagggcatgatgcgctggtgtatgccagtggagctttcccgcgactggctggtgaatctgcttaatcagtgcgatgagctgggcattcgtaaccagtttgaagtggaagtcctgagctacggtcatctgccgctggcctactccgcccgctgctttaccgcgcgtagcgaagaccgcccgaaagatgagtgtgaaacctgctgcattaagtatccgaacgggcgcaacgtgctgagccaggaaaaccaacaagtgtttgtactcaatggcattcagaccatgagcggctacgtttacaacctcggtaacgagctggcatccatgcagggcctggttgatgtggtccgcctgagtccgcagggtactgacactttcgcgatgctcgacgccttccgcgctaatgaaaatggcgctgcaccactgccgttgacggcgaacagcgactgtaacggctactggcggcggctggcaggactggagctgcaagcctaagtaaatagctcactttgttaacaactttaactactctttaatgcagtattaaagattaatcggtaacaaagtgagctgttatgactgataaaaccattgcgtttagcctactcgatctggcccccattcccgaaggttctagtgcgcgagaagcattctcccactctctcgatctcgcccgtctggctgaaaagcgcggctatcatcgctactggctggcagaacaccacaatatgactggcattgccagtgctgccacgagcgtattgatcggctatctggcggcgaataccaccacgctgcatctggggtctggcggcgtgatgttgcctaaccacagtccgttggtcattgcagaacagttcggcacgcttaatacactctatccggggcgaatcgatttggggctgggtcgtgctccgggtagtgaccaacggacaatgatggcgctacgtcgtcatatgagcggcgatattgataatttcctccgcgatgtggcggagctggtggactggtttgacgcccgcgatcccaatccgcatgtgcgcccggtaccaggctatggcgagaaaatccccgtgtggttgttaggctccagcctttacagcgcgcaactggcggcgcagcttggtctgccgtttgcgtttgccagtcacttcgcgccggatatgctgttccaggcgctgcatctttatcgcagcaacttcaaaccgagtgcacggctggaaaaaccatacgcgatggtgtgcatcaatattatcgccgccgacagcaaccgcgacgctgaatttctgtttaccagtatgcagcaagcctttgtgaagctgcgccgtggcgaaaccgggcaactgccgccgccgattcaaaatatggatcagttctggagtccgtctgagcagtatggcgtgcagcaggcgctgagtatgagcttggtaggtgataaagcgaaagtgcgtcatggcttgcagagcatcctgcgcgaaaccgacgccgatgagattatggtcaacgggcagattttcgaccaccaggcgcggctgcatagctttgagctggcgatggatgttaaggaagagttgttgggataatgtgtcttaacgcgggaagccttatccgagctggcaacgctgtcctacatagacctgataagcgaagcgcatcaggcattgtgtaggcagcagaaatgtcggataaggcaccgctgattactgatacaccggcagtaaattaaagctgcttaaaatatgcaccagtgcgttgccgacgccaaacaccagaatcagcgcaatcatcggcttgccaccccagacgcggaatttcgggctgccaaagcgtttacggcttgcacgggctaacagcgccggaacaattgccgcccagatggtagccgctaaaccagcataaccaatggcgtacaggaatccgttcgggaacaacagcccccccacaactggcggggcaaaggtcagcaatgccgttttcaagcggcccacagcgctgtcgtcgaaaccaaacagatctgccagatagtcaaacaaacccagcgttacgccgaggaagctactcgctaccgcaaagttactgaacacgaccagcagcagatccagactacggctgttcagtacgccgcttaacgcctgtaccagcacatcaatattaccgcccttctctgcaataccgataaactccggacgcgggatgttacccatcgtcgccagcaaccagatggtatacagcgccagcgccatcagcgtaccgtacaccagatatttcacgatggttttcggatctttgccgtaatacttcatcaggcttggcacgttaccgtgataaccaaagcttgccagacagaacggcagggtcatcaacagatacggtgcataagacgcattgctttcggcgacgttgaacaatgtcgcaggctgcacatgccccagcaggctaccaaaggtgaggaagaaggtaatgactttcgcccccagcacaatcgctgtcatgcgactgacggctttagtgctcaaccacaccacaaacgctaccagcaatgcaaaaccaaaacccgccgcccgtgccgggacgtttagactcatctctgcgaaggtgtgatgcagaatgctaccactggcagaaatataggcataggtcaggatatagagcacaaaggcaatggaaatgccgttgaccacgttccagcctttgcccagcaaatctttggtgatggtgtcaaaactgctaccgattctgtaattcaggttagcttccagaatcatcaagccggaatgcagcatacagaaccaggtaaagatcagcgccgccatactccagaaaaaccacgccccggacatgaccactggcagagaaaacatccctgcgccaataatggtgccgccgataatcaccacgccgccaagcaggctcggactcgtttgggtggtggttagtgttgccatgagggcttctctccagtgaaaaatagtgcgactgcgttgttatgcattgcactgtaccagtacacgagtacaaaagacagaaaaaaagccccgatggtaaaaatcggggctgtatatattattttacagattgtgttcgctgttcagcgatgattacgcatcaccaccgaaacgacgacgaccggtagaatcatcacgacgcggagcgcggccttcacgacgttcgccgctaaaacgacgaccatcaccacggccaccttcacggcgttcaccgctgaagttacgaccgccttcacgacgttcgccaccgaaaccacgaccaccgccacgacgctcaccgccagtatgcggctgtgcatcgcccagtaactgcatgttcatcggcttgttgagaatgcgagtgcgcgtaaagtgttgcagcacttcacccggcatacctttcggcagttcgatggtggagtgagaagcaaacagcttgatgttaccaatgtaacggctgctgatgtcgccttcgttagcaatcgcaccaacgatatgacgaacttcaacaccatcatcgcggcccacttcaatgcggtacagctgcatatcgccaacatcacgacgttcacgacgcggacgatcttcacggtcaccacgcgggccacggtcgttacgatcgcgcggaccacggtcatcacggtcacggaattcacgtttcggacgcatcggcgcatctggcggtacgatcagagtacgttcaccctgtgccattttcagcagtgccgcagccagagtttcgagatccagctcttcaccttcagcagtcggctgaattttgctcagcagtgcgcggtattgatccagatcgctgctttccagctgctgctgtactttagcggcgaatttttccagacggcgtttgcctagcagttctgcgttcggcagttctacttccggaatagtcagcttcatagtacgttcaatgttgcgcagcagacgacgctcgcggttctcaacgaacagcagcgcgcggccagcacgacccgcacgaccggtacgaccgatacggtgaacgtaagactcagaatccatcgggatatcgtagttaactaccaggctgatacgctcaacgtccaggccacgggctgcaacgtcggtcgcaatcaggatgtccagacgaccatctttcaggcgttccagtgtctgttcacgcagcgcctggttcatgtcaccgttcagcgcggcgctgttgtagccgttacgctcaagagcttcagccacttccagagtcgcgtttttggtacgaacgaagataatcgccgcatcaaaatcttccgcttccaggaaacgtaccagtgcttcgtttttgcgcataccccagacagtccagtagctctggctgatgtcaggacgggtagtcacgctggactgaatgcgcacttcctgcggctctttcataaagcggcgggtaatgcgacgaatcgcttccggcatggttgcagagaacagagcggtctgatgaccttccgggatctgcgccataatggtttcaacgtcttcgatgaagcccatgcgcagcatttcgtcagcttcatccagaaccagaccgctcagtttagagaggtccagagtgccacgtttcaggtggtccagcagacggcccggagtaccgacaacgatctgcggcccctgacgcagggcgcgtaattgcacgtcataacgctggccgccgtacagagcaaccacatttacgccgcgcatgtgtttagagaaatccgtcattgcttcagcaacctgtaccgccagttcgcgggtcggtgccagcaccagaatctgtggtgctttcagctcaggatcaagattctgcaacagaggtaaagagaatgctgcagtttttccgctccccgtctgggccatacccagaacgtcgcggccattcagcagatgtggaatacactctgcctgaattggagatggtttttcgtaacccagatcgttaagggcttcaaggataggagccttcaggcccagatctgcaaaagtggtttcgaattcagccatgtagtacgtgtgcctcaaaattaatggcggccagtctacataactcatcatgaaattgatcagcaattttcattgaaaagtgtgaaccggctcaaagtaggtgtattaacgaacaacaacgccctcacccgttaaggtgatggcaatcaaaaaagattacgggctgatgtgtacgtcagttattgctggtcgctttctgccaggtcatcttggtcctggcccaggaggcttaattccaacaatgcgtatcggtgctcaacaaagttatgaacgttgttggcaaccgccagtttgaacagtgccgtggcgctgtccaaatcccccagacttaggtagtacttacctaaatagaagttggtttcactgagatgctcagcgaggctggtgttatccgttgcgtccgccttgagcctttccattaacgtttgttcgctaatgttgcccaggtagaactcgacaatgttccatccccactgttccttatcgcttttttcgaagtgctgtttcaacacttctttagcctgcttctcatcgagcttctgctcggcgagataaagccacagactacggaaaggatcattgggatcgtcttgataaaacgccagcagatcatcttgcgctaacttgtcacgaccgccgtaatataatgcgatcccgcgattcaagtgcgcgtagttgtaagttggatcaagctcaagtacagaatcaaacgcttcataggcagcatcaaaattgcctgcctgcgttaaatatatgcctaagtaattgaatacttcaggcatatccggtcggattgccagcgcttggctaaaatcgttacgcgctaatgccctcagaccgagactatcatacaacactccgcgctcatataaaagctgtgcgcgttcgtcatcggttaaagcccgactggcaaggatttgttccatacgtgccagaatcacttcctgctgtaaagtcggttgcaatggtaccgcgaggacttcacttttacgccaggaagtattactgcatcctgcaagcgtaagtgctgtcgcaacgaaacaccagcgcaaaaaaggcttcatttcccactcccgaagaccacggttgaatgaacgtcctgttcccggttgctaacaaggcgtcctgcccggttaaaagccccccgccgcagcggagggcaaatggcaaccttactcgccctgttcagcagccggagcttccggtgctgcagcaggttgagactgctcagtcgcttctttaatgctcagacggatacggccctggcgatcaacttccagaactttcaccggtacttcctgacccatctgcaggtaatcggtcactttctcaacgcgtttgtcagcgatttgagagatgtggaccagaccttctttaccgccgccgatggcaacaaatgcgccaaagtcaacgatacgggtcactttaccagtgtagacgcggcccacttcgatttctgcagtgatctcttcgatacgacgaatagcatgtttcgctttctcgccgtcggtcgctgcaatcttcacagtaccgtcatcttcgatttcgatggtggtgccagtttcttcggtcagagcacggattacagaaccgcctttaccgataacatctttgatcttgtccgggttgatcttgatggtatggatacgcggtgcgaactcagagatatcgccacgcggcgcgttgatcgcctgttccattacgcccaggatatgcagacgcgcacctttagcctggttcagcgcaacctgcatgatctctttggtgataccttcaattttgatatccatctgcagtgcagagataccgtcgcgggaacctgcaactttgaagtccatatcgcccaggtgatcttcgtcgcccaaaatgtcagacagtacaacgtagttgtcgccttctttcaccagacccattgcgatacccgcaacggcagctttgatcggcacacctgcgtccatcagcgccagagacgcgccgcacacggaagccatagaagaggaaccgttggattcagtgatttcagacacaacacgtacggtgtacgggaatttgtccatatccggcatgactgccagcacgccgcgcttcgccagacgaccgtgaccaatttcacgacgcttcggagaaccgaccatgccggtttcgcctacggagtacggagggaagttgtagtggaacaggaaggtatcggtacgttcgcccatcagttcatcaagaacctgcgcgtcacgagcagtacccagcgttgcggtaaccagcgcctgcgtttcaccacgggtgaacagcgcagaaccgtgagtacgcggcagcacgccagtacgcacatccagaccacggatcatatctttttcacgaccgtcgatacgcggttcgcctgccagtacgcggctacgaacaacgtttttctcgatcgcgtgcagaatttcacccagttcgttttcgtccagggtttcgtcttcagcaagcagcgtcgcgatggtttcagatttgatgacatcaacctgcgcataacgctcttgtttgtcggtgatgcggtaagcatcgctcaggcgagcttcagccagtgcagcaacgcgcgcgtttagcgcttcgtttaccggctccggctgccagtcccaacgcggtttaccggcttctttcaccagttcattgatgttctgaataacaacctgctgttgttcatgaccgaacactactgcgcccagcatctggtcttcgctcagcagttgagcttcagattcaaccatcagtacagcggcttcagtaccggcaacaaccagatccagtttgctctctttcagctcgtcctgagtcgggttcagtacgtactggtcattgatgtaacctacgcgggcagcaccaatcgggccattgaacggaataccagacagagacagcgctgcggaagcaccaatcatcgcgacgatatccgggttaacttgcgggttaacagaaaccacggtggcgataacctgaacttcgttgacgaagccttccgggaacagcgggcgaatcgggcggtcaatcagacgcgcgatcagggtttcgccttcgcttgggcggccttcacgacggaagaagctacccgggatacgaccagcagcgtaggtacgctcctgatagttaacggtcagtgggaagaagtcctgacctggtttggcttttttctggccaacaacggtaacgaataccgcggtgtcatccatgctaaccataacagcggcagtagcctgacgagccatcatgccggtttccagagtcacggtgtgttggccgtactggaatttacgaacgatcggattaagcaatgtaatatcctttctctttcttagacagtaccttacggcactggtgttaataccgcttcttctgcgcatcctcgcgactaatgacaaccctaacccagctctatgtgggtaaagcctctcattagccgcgcgaacctctgcaacggaagatcattcatagcaacaatacattagtttccagtgaattgctgccgtcagcttgaaaaaaggggccactcaggcccccttttctgaaactcgcaagaattagcgacgcagacccaggcgctcgatgagctgggtgtaacgtgctacgtctttacgtttcaggtagtcgagcagtttacgacgctgagaaaccatgcgcagcagaccacgacggctgtggtgatcttttttgtgctctgcaaagtggccctgcaggtggttgatctgtgcagtcagcagtgctacctgaacttcggtagaaccggtgtcgtttgcgtcacgaccaaactcagaaacgattttagctgttgcttcagtacttagagacattttaaaactccaaagtatatagaatgaaaggacgccgatctctaattcagcgatcccagtgtacgttacgcaaagtgttaaacaatttacgcgacgttaagcggcagtattctactcgtagcgacctgttatcgcaagacggttaacattacgccgggtattcaaccaccaggcgacgaggcgcaacgcggccttcatcgtcaatttcgcccataccgataaatttgccgttctcaccttccgtgacgcgaaccagtccttccagtggcgcaccagatgtacgaaccgggttaccatttttgaagtaaacagaagacgttaacggaagattcaccaccggatagtcgctagctggactgtccattggcatcagtaatggatcaagtaactccgcggctggaatatcctgctgttcagcttgctcaacaagttcacgcaggtgctccagggtcaccatccgttcaaccggatatttacttaccgccagacggcgcaggtaaataacatgcgcgccacagccgagtttttcacccaggtcatcaatgatggtgcggatataagtgcctttactgcagtgaatttccagctccagctcattgccttcatggcgaataaacagcaattcataaacggtaatcggacgcgcttcacgcggaacttcaatgccctgacgcgcatattcgtacagttttttgccctgatatttcagtgcactatacatgctagggatctgttcgatatcgccacggaaagtatccagtgccgctgccagctgctctgcgctaaaggttaccggacgttcttcaacgatctgtccgtcggcatcagaagtatcggtacgctgtccaagacgcgcaatgacccgatagcgtttgtcggagtccagcagatactgggaaaacttcgtcgcttccccgaggcaaatcggcaacatgccggtcgccagcgggtccagcgcaccggtatgcccggcacggttggcgttatatatacgtttcactttttgcagcgcatcgttgctggacataccctgaggtttatccagcaacaaaacgccgttaatgtcgcgaccgcgacgacgaggacgactcattagtcctccttgctgtcgtccgggttaacacgacgttcttcgtcatgtttgaccacgctggtcaccaggttactcatgcgcatcccttcaaccagagagttgtcgtagaagaaggtcagttccggcacgatacgcaggcgcatcgctttccccagcaggctgcggatgaaaccagaagcttcttgcaacgctttgatgcccgctttaaccgcgtcttcatctttgtcgttgaggaacgtcacatatactttggcatacgccaggtcgcgagacatttcgacaccggaaacggtggtcatcatgcccaggcgaggatctttaatttcacgctgcaggatgagagcgatctctttttgcatttcctgcgctacgcgctgcgggcgaccaaattctttcgccataataaattctcctgacaaaaaaggggctgttagcccctttttaaaattaatttcaggtggaagggctgttcacgttgacctgataagacgcgccagcgtcacatcaggcaatccatgccggatgcagcgtaaacgccttatcccgcatggaaccctaaaaaccttaagcaatggtacgttggatctcgatgatttcgaatacttcgatcacatcgccagtgcggacgtcgttgtagttcttaacgccgataccacattccataccgttacggacttcgttaacgtcatctttgaagcggcgcagggactccagctcgccttcgtggataaccacgttgtcacgcagaacgcggatcgggttgtgacgtttaaccacaccttcggtaaccatacagcctgcgatggcaccaaatttcgggcttttgaacacgtcacgaacttccgccagaccgataatctgctgtttcagttccggagacagcataccgctcatcgccgctttcacttcgtcaatcaggttatagatgacggagtagtaacgcagatccaggctttccgcttcaatcactttacgtgcagaggcatcagcacgtacgttaaagccaaccaggatggcgttggacgccgcagccagggtggcgtcggtttcggtgataccacctacgccagaaccgatgatcttcactttaacttcgtcagtagacagtttcagcaaggagtcggagatcgcttcgacagaaccctgtacgtctgccttcaggacgatattcacttcgtgaacttcgccttcggtcatgttggcgaacatgttctcgagtttagatttctgctgacgcgccagtttaacttcgcggaatttaccctgacgatagagtgcaacttcacgcgctttcttctcgtcacgtacaacggtaacttcatcacccgcagccggtacgccggacaggccgaggatttccaccggaatggacggacccgcttccagcacttcctgacccagttcgttacgcatcgcacgaacacgaccgtattcgaagccacacagaacgatatcgcccttgtgcagagtaccttcacgtaccagaacggtagcaaccggaccacgacctttatcgaggaaggattcgataaccgcaccgctcgccatacctttacgtaccgctttcagctccagaacttccgcctgcagcaggatagcgtccagcagttcatcgataccggtacccgctttcgcagatacgtgtacgaactggctttcaccgccccactcttccggcaggatgccgtactgggagagttcgttcttaacgcgatccggatcagcttctggtttatcgatcttgttcactgcaaccaccaccggtacctgcgccgctttcgcgtgctggattgcttcgatggtctgcggcatcacaccgtcgtcggcagcaacaaccaggactacgatgtccgttgcctgcgcaccacgagcacgcatactagtaaacgcggcgtgccccggggtgtccaggaaggtgatcatgccgttttcagtttcaacgtggtatgcaccaatgtgctgggtaatgccgcccgcttcgccagaggccactttcgtactacgaatgtagtccagcagagaggttttaccgtggtcaacgtgacccatgatggtcacaaccggcgcgcgcggttcagccgcagcacccgtgtcacggtcgctcattaccgcctcttccagctcgttttcacgacgcaggataactttatggcccatctcttcagcaaccagctgtgcggtttcctgatcgataacctggttgatggttgccattgcgcccagtttcatcatcgctttgatgacctgagagcctttaaccgccatcttgttcgccagttcgccaacggtgatagtttcgccgatcacaacgtcacggttaacggcctgagcaggcttctggaagccttgctgcaggctagaacctttacgttttccgcctttaccgccacgtactgctgcgcgtgcttcttcacgatcagctttactttcagcgtgtttgttgcctttcttcggacgcgctgctttcgcgttacgaccacggccacggccgccttcgacttcacgatcgctttcgtcttctgcctggcgagcatgttgagaagtagtgacgtgataatcgctggaatcttcagtcggttccgcgttatcagtccatttgttttcttccgccatacgacgtgcttcttcagcaacgcgacgtgcttcttcttcgagtttacgacgcgcttcttcttcagctttacgcttgagctctgcagcttcctgctcacggcgggctttttcagcctgggcgtttttagtcatatcgtcttgttgattgctcactttgtctttttccgcagcttcacgtttcgcttgttcagcagcttcacgcttagcttgttctgcggcctcacgttcagctttttgttgcgcctcgcgtttagcgctttcttctgcctcacgacgggcttgctcttccgcttcacgctgcgcttgctcttccgctgcaaggcgttcagcctcttgcggatcgcgtttcacaaaggtgcgtttcttgcggacttcgatttgtacgcttttgctttttccaccggtaccaggaatgttaagggtgctgcgtgttttacgttgcagcgtcaatttgtccgggccactatttttctgattcaggtggtcaatcaaagtctgtttctcttgtgcagacacagagtcgtcagcagacttccggatacctgcatcagcaaattgctgtaccaggcgttccacggaggtctgtcgctctgcggccagcgttttaatcgttacatctgtcatgctgttccttcctgctacagtttattacgcttcgtcaccgaaccagcaaatattacgggcagccataatcagtgctccggctttttcgtcggtcaacccttcgatatcagccagatcatcaatgccctgttcggcgagatcttccagcgtacaaacgccacgggcggccagtttgaatgccaaatcacgatctaccccttcaaggttcagcagatcgtcagccggtttgttatcaccgaggctttcttcctgggcctgtgcaatggtggccagtgcatttttagcacgctcgcgcagtgcttcaacggtcggctcatcaaggccttcgatttccaacagctctttcatcggcacataggccaattcttccagcgtgctgaagccttcttctaccagaacagtcgcgaagtcttcgtcgatgtcgagatatttggtgaaggtgtcgatcgctgcgtgcgcttccgcctgatgcttagcctgcaggtcgtcaacggtcatcacgttgagttcccaaccgctcagctggctagccagacgcacgttctgaccgttacggccaatcgcctgcgccaggttaccggcttcaacggcgatatccatggtgtgtttatcttcatccaccacgatagaagcaacgtctgccggtgccattgcgttaatcacgaactgcgccgggttatcatcccacaggacgatatcgatacgctcgccacccagttcagtagacaccgcctgaacacgcgcgccacgcatacctacgcaagcacctaccggatcgatacgtttatcgttggttttcaccgcgattttcgcacgagaacccggatcgcgagccgctgctttaatttcaatcacttcttcgccgatttctggcacttcaatacggaacagttcgatcagcatttccggcttggaacgagtgacgaacagttgcgcgccacgcgcttccgggcgaacggaatagagcacgccacgaacgcggtcgccagggcggaagttttcacgcggcagcatatcttcgcgcaggatcacggcttcagcgttgttgcccagatccagagagatgttgtcgcggtttacttttttcaccacgccggtgatgatttcaccttcgtgttcacggaactgatcaaccaccatcgcacgttcggcttcacgcactttctgcacgataacctgttttgccgtctgggtagtgatacggtcaaaggtaacagactcaatctgatcttcaacgtaatcgcccaggttcaggctttcatcttcataacgtgcggcttcaagggtgatttccttggtcggctgggtgacttcatcaacaactaaccagcgacggaaagtgtcaaaatcaccgcttttgcgatcgatctgtacgcggacgtcgatctcttgttcatattttttctttgttgctgtcgccagcgcgctttccaatgcttcgaaaatcttctcgcgaggtagcgccttttcattggatacggcttcaactacagccaaaatttctttgttcatcgcgggcttttcacctcatccagactattaaaagtggggaaccaggttcgccttctggatattactcagcgcgaacacttcatctttaccttcgacggtaactgtgatcatttcaccgtctaccgctttgataacgccctgccatttacgacggttttgtaccgccatacggagaaccagagtcacctcttctccgacaaaacgggcgtagtgttcagccgtgaacagtgggcgatcgagacccggactggagacttccaggttataagcaacggtgatgggatcttcaacatccagcacagcacttacctggtggctcacatcagcacaatcatcaacattgatgccatcttcactatcaatatagatgcgcagtgtggatgtgcgaccgcgaataaattcgatgccaaccagttcaaaacccagggcctcaactggcgcagtaatcatctctgttaatttttgctctaatgtggacaagcccacccccaagacataaaaaaagggcctaaagcccagttattctgtagtcagataacaaaaaaccccgataaatcggggctttatataactgaaccctataaccgcaactgcggtctggagcactttccagaaggattttttcaaatcccactacgaaggccgaagtcttcacagtatatttgaaaaaggactctaagggaaagtggttgcgggggccggatttgaaccgacgatcttcgggttatgagcccgacgagctaccaggctgctccaccccgcgcctgaaacgtggcaaattctactcgttttgggtaaaaaatgcaaatactgctgggatttggtgtaccgagacgggacgtaaaatctgcaggcattatagtgatccacgccacattttgtcaacgtttattgctaatcatgtgaatgaatatccagttcactttcatttgttgaatacttttgccttctcctgctctcccttaagcgcattattttacaaaaaacacactaaactcttcctgtctccgataaaagatgattaaatgaaaactcatttattttgcataaaaattcagtgagagcggaaatccaggctcatcatcagttaattaagcagggtgttattttatgacgacgattctcaagcatctcccggtaggtcaacgtattggtatcgctttttctggcggtctggacaccagtgccgcactgctgtggatgcgacaaaagggagcggttccttatgcatatactgcaaacctgggccagccagacgaagaggattatgatgcgatccctcgtcgtgccatggaatacggcgcggagaacgcacgtctgatcgactgccgcaaacaactggtggccgaaggtattgccgctattcagtgtggcgcatttcataacaccaccggcggcctgacctatttcaacacgacgccgctgggccgcgccgtgactggtaccatgctggttgctgcgatgaaagaagatggcgtgaatatctggggtgacggtagcacctacaaaggaaacgatatcgaacgtttctatcgttatggtctgctgaccaatgctgaactgcagatttacaaaccgtggcttgatactgactttattgatgaactgggcggccgtcatgagatgtctgaatttatgattgcctgcggtttcgactacaaaatgtctgtcgaaaaagcctactccacagactccaacatgcttggtgcaacgcatgaagcgaaggatctggaatacctcaactccagcgtcaaaatcgtcaacccgattatgggcgtgaaattctgggatgagagcgtgaagatcccggcagaagaagtcacagtacgctttgaacaaggtcatccggtggcgctgaacggtaaaacctttagcgacgacgtagaaatgatgctggaagctaaccgcatcggcggtcgtcacggcctgggcatgagcgaccagattgaaaaccgtatcatcgaagcgaaaagccgtggtatttacgaagctccggggatggcactgctgcacattgcgtatgaacgcctgttgaccggtattcacaacgaagacaccattgagcagtatcacgcgcatggtcgtcagttgggccgtctgctgtaccaggggcgttggtttgactcccaggcgctgatgctgcgtgactctctgcaacgctgggttgccagccagatcactggtgaagttaccctggagctgcgccgtgggaacgattatagtatcctgaataccgtcagtgagaacctgacctacaagccagagcgtctgacgatggaaaaaggcgacagcgtgttcagcccagatgatcgtattggtcaattgaccatgcgtaacctggatatcactgatacccgcgagaaacttttcggttatgccaaaactggcctgctttcctcctctgccgctagtggcgtgccgcaggtggagaatctggaaaacaaaggccagtaattcgacatcaaccctgcccttcaggggtggggttaccttgcttatcctctgtaaactcctttctgagcatcacataatcgaaaacatcatggtttgcatccacaacccgactgtctcctttatagtgtgcaatcacttcctcaagcgtttgcggctgttccggctttgttacccccatccacgcattaataaggtaattattgtaagctgtgctaaagatgttgttttccgttgtgcgatccacgccatccccaagaacggggctataccagataaacatcgggacatgatatgcctgctggctagcctccctgcctccatgaaaatagacgttcttcttcgtagggtcacgttccaggccgtggtcggcaaaatacatgacgctggcgcggcgatcttttaataattcaaaaacctgacctagcaaactatctgtgtaatgaatggagttgtcatagcaggcatcctgatcgtcctgcggttgaaacacggcgctggattgcggataggcgctacaagccggttcatggcttccatttaaatgaagaacaatcagtttcttttgctgcgtattttgctgtaatgcttggcttaaatgcggcaacaacaattcatcaaatcctctgacataaactgtttccatggcgcgcatggcgatactggtaactgctgtaccattctgccgaaaagcggattggctgcttagccagaaagtctgaaatcctgcttgattagccatattaataatgttgtcggggtaattatgaatgtcatgactcaaaacagaatcagcagttaaagaaaggggaacgctcagcgcagtgtaaggtgcgccgcttattgcttgattaaacagtttgatctgttttctttgtgcttcaacttgcggtgtcgtagagcgtgtatatccatacaaagacatattgtcgacacgtacagactcccccacaatcaacacgtaggtatcaatacctgtatccctgacacttaattgaaaatacggcaccgtgtttgcaatactgagtaatctttgatgctctttcgctgctaaagcaaaatagttgagattgaaaaacggcgtataggtagcaaatcggctcgctagtatatatggactgaacgcttttttattttttgcatctttataagcaaattgacaagcggaaaataaactgccgctaatgacaatcagcaataatattcctgtcactttttttgtcggcaaggaaacatcatattttattattactgccaaaaaaagaagggataaaaaagcaaaggcacatagataagggatatacatccccagcattttgacaacttcatccggatcactctggagcacactaatcgcaaatccatcattgaaagttgtaccaaaggtacaccaactatagaggctaatactcatgtctgccgcagtcagtaacacaaatggtgcggcaacaagcaggcgaagcggaagggaacttatacgttttacaaccaggatggtcagaacgaagaacagcaagcgctgaaccatatgcgctccggaagaagcgactaagttcgtaataccaaaaacaataacacaaagatacaacaaccaatgagatttaaaagttctagcaaatttgttgaatactgtcatccagaaatccaagttcacaaccaatataaacaattatcaacaatgtttaattttatatcagacatgtttttcaactctgatccatatcagaacgaaacactgttagttttttctttttaaatgatgcggccattgcgttctcagtaattaaataacattatcaatgcgtctctaaacattacgcagaacgtagccatcagtcgttatactgacaggagcaggatggtttatcgagaagtaaacatatccgtattcgtaccggaactggagttgacacaataaagtgccaattatgtcagtagaagggaaaaatttataactaaggcgtaccggcaccatcgtttcaaggtaccagctacgagtaaagcaactggacgagatacagatacctgacaaccattcctcagaccaggaccaaaacgaaaaaagacgcttttcagcgtctcttttctggaatttggtaccgaggacgggacttgaacccgtaagccctattgggcactaccacctcaaggtagcgtgtctaccaattccaccacctcggcacggatactactttttagttcgggatatcgctggtcggcttagccggagcagctggctgagtttgttcggttttcgccggtgcactcagattttcccattcgctacctttattggttttgttgctattgatgttacccagcaccagactgatgatgaagaataacgttgccagcagcgccgtcatgcgggtcatgaagttaccagaaccactactaccaaacagcgtagcggaagcgcctgctccgaaggaggctcccatatcagcgcctttaccttgctgcagcatgatcagaccaacaaggccaattgccacaataaggaaaactactaaaagagcttcatacataatcaacctgttccttgcggagttgccgcgtaccaatgcttcaaccaataaagcgggagtttttaatcttccccactgaagcgggtgtgaatactaaccaaagcgaatgaccttcgcaagggcaattttatcgcattgtatcaactgcggaaaaaaacagcaaaaccgatgtgttcgctgagaaaaaaggcgacaatcgccgcctttttagccagttatctaacgctttaaacggcttttactgcatcggcgatgcggtgtgcaaattcagtcacctgcgcttcgtcttcgccttccaccatcacgcgaattaacggttcggtgccggatttacgcagcaacacgcgtccacggttgcccagcgcagcttcaacctctgcggtcacggctttaacactctcatgctcaagtggatcgccgctacctgcggtgtaacgtacgttaaccagaatctgcgggaacattttcatgccgctgcaaaggtcgtgcaggctcatatggttacgtgccatcgccgccagcacctgcaagccagcaacgatgccgtcaccggtagtagttttatccagcaggatcacatgaccggaattctctgcaccgatacgccagcctttctcctgcattttttccagtacgtagcggtcacccactttcgcgcgcgcaaatggaattcctaactgtttcagcgccagttcaagccccatgttgctcatcaatgtacccacagcgccaccacgcagctggccctgacgaagaccttcacgcgcgatgatatacatgatctgatcgccatcgactttattgccttcatggtcaaccataatcacgcgatcgccatcgccgtcgaaggcaataccgagatccgctttttcagccagcacacgagcctggagcgcgcgaacgtcggtagcccccacttcggcattgatgtttacaccgtttggctcacaaccgatagcgataacgttcgcccccagttcgcgcagcacgttcggcgcgatgtgataagtcgcaccgtttgcacaatccaccacaatcttcagttcactgaggctaagttcgttcgggaacgtggctttgcaaaactcgatatagcgacccgcggcatcaacgatacggctggctttacccagttctgcgctatcaacgcagctgatctccttttccatttccgcttcgatggcctcttctaccgcatccggcagtttggtgccgtcgatagagaagaatttaatgccattatcgtagaacgggttatggcttgcagatatcacaattccggcctctgcgcggaaggtacgcgtcagataagccacggccggtgttggcatcgggccagtgaagagtgcggaaaggcccgctgccgccagacccgcttccagtgcactctccagcatatagccagaaatacgcgtgtctttaccaataataatcttacgggagccgtggcgcgccagcactttacccgcggcccaacccagcttaagcacaaaatcaggtgtgatcggcgcatcccctacacgaccacgaatcccatcggtaccgaaatatttacgattactcatagcgtttgttttcctttgcagacagagtggcttccaccacccgcatcgcttctacggtttctttgacgtcatgaacacgaatgatgtgcgcgccttgcattgcggcaatgaccgcacaggccagactaccgctcaggcgctcggacggccccacgttcagcagctgcccaatcatgctttttcgactcatacccaccaacagcggcaggttgaaatggtgaaattcagccaggcgcgccagtaaactatagttatgggagagatttttaccgaaaccgaatccggggtcgagcaacaatttctcttttgcgatacccgcctgctcgcaacgtgctatttgctcaataaagtagcgattcacttctgcaaagacatcgtcatacttcggagcttcctgcatggtttttggatttccctgcatatgcatcagacaaaccggtaaaccggtttctgcagccgcctccagagcgccaggttcggaaagggagcggatatcattaataatgtgagcgccaactttcgcactctcacggatgacttctggtttggatgtatcgacactgatccagacttcgaagcgttgagcaattgcctcaaccacaggaataacacgttgcaactcttcttcaacgctaacttccgccgcccctgggcgcgtggactcgccaccaacgtcaatgatcgtcgcgccagcgttgatcatcagattcgcatgtttcaccgcatctatcaggctgttatgcgtgccaccatcgctaaaggaatcaggcgtgacgttgaggatccccattacgtgaggatggctaaggtccagactagtaccctgggcaaagagtttcatgatgttatccctggtatgaattgataagaaaaaaccccggagcacgccccggggttttcggtacaaatacagtcatctgatgcgggaacttacttgtcgcctaactgctcactcatggtgttacccgggttcggcgtacgcggttcatcaaccggacgaggagcctttggactaccattgtcgccagaattgttagaagcgcctggttcttcccagcccgctggcggacgtacatcgcgacgtgccatcaggtcatcaatctgcggtgcgtcgatagtctcatatttcatgagagcatctttcatcgcatgcagaatatccatattgtcggtcagaagctgacgcgcacgattatagttacgctcaatcagtgctttcacttcctggtcgatgatacgtgcagtttcatcggacatatgtttcgctttcgctacgctacggccgaggaacacttcaccttcttcttccgcgtacagcagtggacccaatttctcagagaagccccactgagtcaccatgttacgtgccaggttggtcgcaactttaatatcgttggacgcaccggtagatacatgttccggcccgtagatgatctcttctgccagacgaccaccgtacagcgtagaaatctggctttccagtttctgacggctggcgctgattgcgtcgccctcaggcaagaagaaagtcacacccagcgcacgaccgcgtgggataatcgtcactttgtgcaccggatcgtgttccggcaccaggcgaccgataatcgcatgacccgcttcgtggtaagccgtgctttctttctgcgcttccgtcatcaccatggagcgacgttccgcacccatcatgattttgtctttcgctttctcgaactcaaccatgctcacaacgcgtttgttgccacgagcagcgaacagtgccgcttcgttcaccaggttcgccaggtcagcaccggagaaaccaggagtaccacgggcaatgattgccgcgtcgatatcgggtgccaatggtacgcgacgcatgtgaactttcaggatctgctcacgaccgcgaacatctggcaagccgaccacaacctgacggtcgaaacggccaggacgcagcagggccgggtcgagaacgtccggacggttagtcgcggcgataacgatgataccttcgttaccttcgaagccatccatctcaaccagcatctggttcagagtctgttcacgttcatcgtgaccaccgcccagaccagcgccacgctggcggcctacggcgtcgatttcatcgataaagatgatgcacggtgccgctttcttcgcctgttcgaacatgtcacgaacacgggatgcacccacaccgacgaacatttctacgaagtcagaaccggagatagtaaagaacggaactttcgcttcgcctgcaatcgctttcgccagcagcgttttaccggtacccggaggaccgaccatcaagacgcctttcgggatcttaccgccgagtttctggaagcggctcggctcgcgcagatactcaaccagttcagcaacttcttcttttgcttcgtcgcagcccgcaacgtcagcaaaggtcgttttgatctgatcttccgtcagcatgcgcgctttgctcttaccaaagctcatggcacctttgccaccgccgccctgcatttgacgcatgaagaagatccagacaccaatcagcaacagcatcgggaaccaggagatgaagatagaagccagcaggcttggttcttcaggcggttcaccgacaaccttgacgttcttggtcaacaggttatccagtaatttcggatcctgaaccggaatgtaagtggtataacggttactatctttcttggtaacgttgatttcacgtccgttgatacgcgcttcacgaacctggtcgttattgacctcttgtaggaaggtagagtaatccaccttacggccattagactcgctgggcccaaagctctggaatacactcatcagcacaacggcaatgaccagccagagtattaggtttttcgccatgtcactcaagggattaacctcttattacaactgtgttaaaaacagcgtcaggatactctatatccagcatctttcaaactttcgtctgaaatctcccggttagggtttacgcccggtcgctacaatatacacttcccggctacgtgcacgagaagagtccagcttacgaactttgaccttcgtaaacagggagcgaatttcccttagatactcatcgaaaccttcgccctggaacaccttcactacaaaactgccacctggcgctaatacatcacgacacatttctagcgccagttccaccagatacatggcacgggggatatccaccgccggtgttccgctcatgtttggtgccatatcggacatgacaacctggactttgctgtcgccaacgcgctccagcagtgctttcatcaccagttcatcacgaaaatcgccctgaagaaagtccacaccaacgataggatccataggtaaaagatcgcaagcgatgatgcggcctttgccgccaatttgggtgaccacatattgactccaaccacccggagcagcaccaaggtcgacaaccgtcattcccggtttaaagagtttgtcactttgctgtatttcatcaagtttaaaccaggcacgggaacgtaacccctttttctgtgcctgttgaacatatttatcgctaaagtgttcctgaagccagcggctggagctggcagaacgcttcttacctgtcatttaactttcccatggggataactcatcgtaaccaattgcgtaaatttttacgcgcctatttggtgatatatgggagatggcggtagaatgacccgttttcaatcccaacgtaagcaaaaaatacgatgaatctgagtactaaacaaaaacagcacctgaaaggtctggcacatccgctcaagccagttgttctgcttggcagtaatggtttgaccgaaggggtgctggccgagattgaacaagcgttagagcaccatgaactcatcaaggtgaaaatcgccaccgaagatcgcgaaactaaaaccttgatcgtggaagctatcgtgcgcgaaaccggcgcctgtaatgtacaggtcatcggtaaaacgctggtgctttatcgcccaactaaagaacgtaaaatcagcctgccacgctaagattatcctaaagttacacacatttgctgtgtaaaacgaggggttttccgcaggcaggagagcaaaatgccacgctctgttcgttgataaaaggccgcatagcggcctttttcctttctttacaatacatcaacatcttgagtattgggtaattcttacaggtattccaccttaattacttcaaattctacttcgccgcccggcgttttgatgaccacaacatcatcttcttctttgccgatcaggccacgagcaatagggctgtttacagaaatcaggttttgtttaaagtcagcttcgtcatcgccaacgatgcgataagtctgttcttcgtcagaatccagattcagcaccgttacggtagcaccaaaaataacgcgcccattgttgggcattttggtgacatcaatcacctgcgcgttgctcagcttggcttcgatgtctttaatacggccttcgcagaaaccctgctgttcacgagctgcgtggtattcggcgttttctttcaggtcgccatgctcacgcgcttccgcgatagcagcaatgatttcaggacggcgcacagatttcagaaaatccagctcttcgcgtaatttttcagcgccgcgtaaggtcatcggaatagcttgcatttgttatacctcttgaatattcctgatagggcaagtcttcacccaccccggctgttcggcctgcccggcataactccttaccgggaccagaagcaaaaaaataccgacccgggtacaagtcccaggtcagctacaattcacattttgatagtcattttaccctgaagttcccgaagggtcatcgtttactttatagggcgttgcgccgtagtatgacggctcgattccaggttgttagcgcgagattatgcgattttccagatttatcatcggattgaccagctgtatagcgttcagtgttcaggccgcaaatgttgatgagtacattactcaactccccgctggtgccaaccttgccctgatggtgcaaaaagtcggcgcgagcgcccccgctattgattaccacagtcagcagatggcgctgcctgccagtacccagaaagtgattactgcgctggcggcgttgattcaactcggccccgattttcgttttaccacgacgcttgaaaccaaaggcaatgtggaaaacggcgtacttaagggtgacttagtggcgcgatttggtgccgatccgacgttaaaacgtcaggatattcgcaatatggtcgcgactttgaaaaaatctggcgtcaaccaaatcgatggcaatgtgttgatagatacctccattttcgccagccacgataaagcccccggctggccatggaatgacatgacacaatgctttagcgctccgcctgccgccgccatagttgaccgcaactgtttctccgtcagcctctacagtgccccaaagcctggtgatatggcttttatacgcgtggcatcttattaccccgttacgatgttcagccaggtacgcaccctcccccgtggttctgccgaagcgcaatactgcgaactggatgtggtgccaggcgacctgaaccgctttacgctgacgggatgcctgccacaacgttctgagccgctcccgttggcttttgccgtgcaggatggagccagctatgccggtgcaattctgaaagatgagttaaaacaggcgggtatcacctggagcggaacactgctgcgccagactcaggttaacgaacctggaacggtagttgccagtaaacagagcgccccgctgcacgatctgcttaagattatgctgaaaaagagcgacaacatgatcgccgatacggttttccgcatgataggccatgcgcgcttcaatgtgcctggaacatggcgggccgggagcgacgccgtgcgtcagatcctgcgccagcaagccggtgtcgatattggaaacaccattattgccgatggtagtgggcttagccggcataacctgattgcccccgccaccatgatgcaggtgctgcaatacattgcccaacacgacaatgaacttaactttatctccatgctgccgctggcgggctatgacggctctttgcagtaccgtgcaggtctgcatcaggcgggcgtggatggaaaagtcagtgcgaaaaccggtagcttgcagggggtatataacctggcgggattcattaccacagcgagcgggcaacgaatggcgtttgtgcaatatctttctggctatgcagtagaacctgcggatcagcgtaatcgccgtattccgttagtgcgttttgaaagccgtttgtataaagatatttatcagaacaattaatcaaaaagaaaccccggcacatggccggggcttcagattattgacaaagtgcgctttgtttatgccggatgcggcgtaaacgccttatccggcctacaaaatcgtgcaaattcaacatattgcaattctcttgtaggcctgataagcgtagcgcatcaggctgatttggcgtttatcatcagtgattaacgcttgtaaatgaactcaacgccttcttcgtcgtcttcgtcccagtcgtcatcccagtcttcatcatcctcttcagcaatctcttcaagctgctggcgatgataatcatcccacatgaattcgactttctctggctgtttcgcttcttcagcctgcacgaccgggttttcaatgataaaggtcatcacatcccagcagagatctttcacgcccagtccactcgccgcagagatcagataatatttatcttcccagcccagcgcctcagcgatcgctttcgctttctcttcggcttctaccttatccagcagatcgatcttgttgaacactaaccaacgcggtttcgtcgccagatcctggctgtatttttccagctcgctgataataatacgcgcgttttcaaccggatcggtgccgtcaatcggatcgatatcgatgaggtgcaacaggacgcggcaacgttccaggtgcttcaggaagcgaatgcccagacctgcgccttccgcagcgccttcaatcagtcctggaatatcggcaacaacgaagctcttttcgttgtccattcgtaccacacccagacttggcaccagagtggtaaacggataatccgccactttcggtttagccgcgcttaccgcacgaataaaggtgcttttacccgcgtttggcatccccaacataccgacgtcagccagcagcatcagctccagcagcagctcgcgcttatcgcccggcgtgccgttggttttctgccgcggtgtacggttaacggagcttttgaaacgggtattgcccagaccgtgccagccgcccttagcaaccagcagacgctgaccgtgtttggtcatatcgcccatggtttcaccagtaccctggtcgattacacgcgtacctaccggcactttaatcgtcacgtctttaccgcgcttaccggtacagtcgcggcttgcgccattctgaccgcgctctgcacggaaagatttttcaaaacgataatcgataagcgtgttcaggttctcgtcggcttccatccatacgtcaccaccatcaccgccgtcgccgccatccgggccgcctttcggaatatacttttcgcggcggaagctcacgcaaccattaccgccatcacctgcaacgaccagaatgcttgcttcatcaacaaacttcattttattctccgtaaatcattcgcctgcgcggggttggcttaccaccgttgtatgcttacgtaatccgccccaaatacgatgaccaatggcggaatacatcgcgcccgcaaccacgacaaacgcaccgagataacctaaaaggtttaacatcggtctggcgaagaaatcgggccaggccagacttaaaagatcactaaaaaacagcgtaaacagtggggtgagcgtgatgatcgcgctcacctgcgctgcctgccagcgagccatcgcttccgccagggcgccatatcctaccaaggtattcagtccgcaaaaaattaaacatgcgagctgccagtggctaagctgcgctatcactccaggctttgccagagggaagagcgcaattgtacataaagtgtacagtaaaaacaggatctgcggactggccagccgacgcaataaaaccttttgcgccacgccataactcacccaaaccgtcgccgcaccgaccccaaagataactccccaggtgtaatcggtgagctttgtaaatatctcgaccagactggtgttaaaaaacatcaccaggccgctcaggagcatcaatgcccctacaacctgagtgctgcgcattttctctttgaggataaatacgctggcaaccatcatgccaactgggctgagttgcccaatcacctggctagcggtcggactcaggtattgcaaggaactgctgaacaggatgaagttcccaaacagcccggcggtcgccactgccaacaaaatcaaccagcgtggcttacgaaacacgcgtaatggcggcaacctcttcttcaccgcaagaatggcacccaggccaatactcgccatcaagaaacggtaaaacacgattgtcggaggttccatcacctccagcacctgcttcattgcgattggcaacgccccccagcaaattgctgtggtgagcgccaaaagaatgccaatgcctgcctgctgcttcataccgtattccctgcaaagcgcatttgcggattaacgtcgcaccatgcgcatttttaccggttatcgaatgtaaaaagccccgcaacgtgttgcggggctttcatccgttaccgggacgcgaaaaacttattcagcttcgatgctgataaatttacggtttttcgggcctttaacttcgaatttcactttaccgtctgctttagcaaacagagtgtggtcacgaccgcaacctacgttagcgccagcgtggaatttggtaccacgttgacgaacgatgatgctacccgccagaacggattcgccaccgaaacgcttaacgcccaggcgtttagcttcactatcgcgaccgttacgtgtggagccgccagcctttttatgtgccatttgaaatctctcctcaggtcttaggcgctgatgccagtaattttcacatcagtgaaccactgacgatggccctgctgcttacgatagtgtttacgacgacgaaacttaacgattttaactttctcgccacgaccgtgagcaacaacttcagctttgattacgccgccatcaacgaaaggaacgccgattttgacttcttcaccgtttgcgatcatcagcacttcagcgaactcaacagtttcgccagttgcgatgtccagcttttccaggcgaacggtctgaccttcgcttactcggtgttgtttaccaccactttggaaaaccgcgtacatataaaactccgcttccgcgcacaccttttcaatgattcagagtgcgctataaatattcacaatagggcgcgaatattacgcaaaacgcacgcctttgacaagtgctacagtcaatacacgaagaaaaaaaacacaacttgtacggtaacgtttatctgtgccattttttcagtacaatcaccctatattcctaaccataaaccctaagttgcctttgttcacagtaaggtaatcggggcgaaaagcccggcttttgcgatgaatttagaaaaaatcaatgagttaaccgcgcaagatatggcgggtgttaatgcggcaatccttgagcagcttaattccgacgtccaactgatcaatcagttaggctattacatcgtcagcggcggcggtaaacgtattcgtccgatgattgctgtactggctgcacgagctgttggctatgagggaaatgcgcatgtcaccattgctgccctgatcgagtttatccacacggcgactctgctacacgacgacgttgtggatgaaagtgatatgcgcaggggtaaagctaccgccaacgccgcatttggcaatgccgccagcgtgctggtaggcgattttatttatacccgcgctttccagatgatgaccagcctcggtagcctcaaagtgctggaagtcatgagtgaagccgtaaacgtcatcgcagaaggtgaagttctgcaactgatgaacgttaacgatccggacatcactgaagaaaactacatgcgcgttatctatagcaaaaccgcgcgtctgtttgaggctgccgcgcagtgttccgggattctggctggctgtacgccggaggaggagaaaggcctgcaggattatgggcgctatctcggcactgctttccagttgatcgacgatttactcgattacaatgccgatggcgaacagttaggtaaaaatgtcggcgacgatctgaacgaaggtaaaccgacgctgccgctgctgcatgcgatgcatcatggcacaccagaacaggcacagatgatccgtaccgccatcgaacagggtaacggtcgccatcttctggaaccggttctggaagcaatgaacgcttgtggatctcttgaatggacgcgtcagcgtgccgaggaagaagcagacaaagccatcgcagcgttacaggtgctcccggacaccccttggcgagaagcactcatcggcctcgcgcacatcgctgttcaacgcgatcgttaatcccctcccctcatcccgcgcagcgcgcgggatggttccagtaagttccataaaaacacttattcagctctataacacctgaaaaatagggatgtgcatctttatatattctgaatattcacactctttacaggaactttttagagcaataggccatcaggagtatagtgatgctcgacagaagaagtgttctgaatgaaagcgactaacttaaggagtgaggaaaaatggaaagtaatttcattgactggcatcccgctgacatcattgcgggtttgcgcaagaagggaacgagtatggcggcggaatctcgcagaaatggtttgagttccagtacgctggcgaatgcattaagccgcccatggccgaaaggagagatgattattgcgaaagccctgggaactgacccctgggttatctggccaagtcgctaccatgatccgcagacccatgagtttatcgacagaacgcagttgatgcgtagctacactaaaccgaaaaaatgagtggtctggcggtagccccgcgaacggggctgccagctctcagacgattattcgcctttcacacgctcaatatttgcacctaaagcgcgcagtttgtcttcaatgcgttcgtagccacgatcgatgtgataaatacgatcaaccaccgtcgtcccttccgcaatacagccagccagcaccaggcttgcacttgcacgcagatcggttgccataacctgtgcgccagaaagtttttcaacaccgtgacaaataacggtattgctttcgatttcggcgtgcgcgcccatacggctcagctctggcacatgcataaagcggttttcaaagaccgtttcggtgataaacccggtcccttctgccaccaggttcaacagcgtgaactgggcctgcatatcggtcgggaatgccggatgcggcgcggtacgtacgttaacagccttcggacgtttgccatgcatatccaggctaatccagtcttcgccgacttcgatgtccgctccagcgtcacgcagtttcgccagcacggcgtcgagagtatctggctgcgcgttacggcagataattttgccgcgagaaatcgccgccgccaccaggaaagtaccggtttcgatacgatccggcagaacgcgatagacaccgccgcctaaacgttccacaccttcgatgacgatacgatcggtgccctgaccgctaattttcgcacccagcgtaatcaggaagttcgcggtatcgacgatttccggttcacgcgctgcgttttcaataatcgtggtgccttccgccagggttgcagcacacatgatggtcaccgttgcgccaacgctgactttatccatcacgatatgtgcacctttcaaacgaccatcgacggaagctttaacgtaaccttcttccagtttgatggtcgcgcctaattgttcgaggccagaaatgtgtagatcaaccggacgcgcaccgatcgtacaaccgccaggtagactaacttgcccctgaccaaagcgcgctaccagcggccccagcgcccagatagaagcacgcatggttttaaccagatcgtaaggtgcgcagaatacattaacgtcgcgggcatcaatatgcacagaaccattacgttctactttcgcacccagctggcttagcagcttcatacttgtatcgacgtctttcagtttcgggacgttctggatctctaccggttcttccgccagtagtgcggcaaaaaggataggcagagcagcatttttagcgccggaaattgtgacttcgccctggagcttcgttggcccctgaacacgaaatttatccatttagtttgttctcagttaacaattcatatccgctaccggcgaatcgcccatagctcaaaagccgttcagtttgcgatcgcgcgcccactccgcaggggtatacgctttgatgctcacagcatgaatgcggttatccgcaatatattccatcagcggaccatagaccgtctgctgttttttaacccgactcatgccgtcaaacaactcacccacggcaataacctgaaagtggctgccatcgccggaaacgtggacttcctggagggagagagcgttcatcaacacgctctgaatttcattattttccatgggatcttcaatcatcagttaataaaccagcgaaacatcttagagcaaagttgcgctggcataaataagcaaaaagcctcgctgataaatcagacaaggctcgacttgcaggcaggtttgccggacaggcggttaacgccatatccggcctgaaaaaatttaacgaggcagaacatcagcaggcaaattatacaatttcgccagggtatacactttgtcgtttaccccctgaagcgtcacattgttgccctgctttttcgccagatcgataagatggagcagcagtgccagtccccccgtatccacgcgggagacacggctaagatcgatgcaggtaatccccttcaccgcttcctcacgcatttcccaaagcggtagcaaaacgtcctgatccagctctccggataacgccagcgtgtcacccgtctgcatccagctcagactctcgctcattattttttctcttccagagtgattttctgttgagaaatgcttttcagttgcgcagtcaggccgtcgatacctttggtacgcagcagcgttccccactcgttttgtttggtggtgatcatactgacgccttcagcaatcatgtcgtaagcctgccaattgcccgtctgggagtttttacgccactggaagtccagacgcaccggcggacggccattcgggtcaataatggtaacgcgaataggcacaatggttttatcgcccagcggctgttctggcgcaatctgataggtttgaccgtgatacatcgccagcgcctgaccgtaagcctgcttcaggtactcacggaaagcggcaaagtaggcttcacgttgagcaggggtcgcactcttgtaatactggcccagcaccagcgcaccggcgtatttcacctgtacgtatggcagcagttcctgatcaacaatggtacgcagataatccgggttggcccgaatttgcggttgctcattcttcaggcgatcgaacgttttctgcgccgcctcgtccatcagcttatacggattggtctggtctgccgcggttgccgcactcagaggtgcaatcaccagcaaagcgaccatcattaaacgtttaaacatgcgtcggttctcctgaaattatttcgttgtacccacaggttcagtggtttcattattacctggcgcagcagctggcgcatcgccactattcttattgtcatcgcctttactaccgtaaaggaactgaccaatgagatcttccagcaccatcgcagacttagtgtcctgaattgtatcgccatccttcaggatagcagtccccagttccgggtcttcaaaaccgacgtttaatgccagatattgttcccccagcaggccggaagtacgaatgctcaggctactggtatctggaatgtggttataacgttgttcaatttccagcgttacgcgcggcagataggttttcgggtccagcgtaatatccgccacccgacccacaacaacgccaccaatactgaccggagagcgcgctttcaggccgccaatgttatcgaacgtcgcataaagcgtgtaggtcggttcagtacgtatggacgtcacgttcgccgccttcaggcaaacaaacagcgccgccagcagtgctgctaataaaaagatacccacccaaatttcattttttttcgtttgcatgaactcaattcccaaacatcaatgcggtcagcacaaaatccagccccagaacagccagagagctgtggacaacggtgcgagtggttgcccggctaatcccggcagacgtcgggatggcgtcgtagccgttaaacaagctaatccacgtcaccgtgatggcgaacaccacgctcttaatcagacagttgaccagatccatacgccagtcgacggcattttgcattgcgctccagaagaacccgctatcaatgcctttccaactgacgccgaccagagatccgccccagatccccacggcgacgaaaataaccgtcaacagtggtaaactaataaccccagcccagaaacggggagaaataacccgacgcagcggatccaccgccatcatctccatactggagagttgctctgtagcgcgcatcaggccgatttctgcggttagcgcgctaccagcacgcccggcaaacaacaacgcggcaaccaccggccccagttcacgcagtaggcttaacgccaccagcatacccagactggtttccgcactataagtggtcagaaccagataaccttgcagccccaacaccattccgatgaacacgccagaaaccacaataatcagcatgctcaggacgccgacattatagagctggcgcaccagcagcggcgcatgtttgcgaaattccggtttgccgaccagcgcattgaataacattaacccggcccgcccgaacgttctcagggttttaatccctttatgtccgaggctcgccagcgcatttaacagcatgagtggcttaactccctggtaaaagatcagcgtgataatcgccggcaggatagcggaacggaacaggcccgtcagctatcccgtccagaaactgacgtacgcgcggatcaggattcgcctgcaacgcctgggcactgccatgagcgacaatttttttgtccgccaggatccaggcgtgatccgcaatacttaacacttccggcacatcgtgagaaaccaccacacaagtcacgcccagcgcgctgttcagctcagaaatcagcttcaccagtacgcccatggtgatgggatcttgcccaacaaaaggttcatcaaacatgatgagatccggctccagcgcaatcgcacgcgccagcgctgcacgccgcgccatcccaccggaaagttcagaaggcattagtttagccgctccacgcagccccacggcctccagcttcatcatcaccgtactatgcaacaatggcgcgggaagttgggtatgttcgcgcagtggataggcgacgttgtcaaatacgttcatatcagtgaacaacgccccggactgaaataacatgctcatccgtttgcgcactgtatacaggcggctacgagacatcgccggaatattctcaccatcgaaaaggatctcaccatgatctggtgcgatttgcccgccaatcagacggagtagcgtcgttttaccgatgccgcttggccccatgatcgccgtgatcttccctcgcggcacggtcagggaaatattatcgaagatgcagcgattgccacgcgtaaaactgacatcgcgcatatcgactaaattcgccacagactgctccataattcacccttcgtcttgcgttgattttctaagcatggcgctcaatttaaccttgaacccaacatatttacagaatattacccgccgtggttagcgaaagctggcatttgttttactttttagccgcataaagtcaaaattaagcatccgttacggctttctgaaaatcttcagcggaccggcgagtatacctgaagaaaggacgttagatgcttttagctacggcactgttaattgttggtttacttttggtcgtttacagtgccgaccgcctggtttttgccgcgtctattctttgccgaacctttggcatcccgccgctgatcatcggcatgacggtggtcagtattggtacaagcttaccagaagtcatcgtcagccttgccgcgtctctgcacgaacaacgcgatttagccgttggtacagccctcggcagtaacattatcaatatattgctgatcctcggtctggctgcgctggttcgtccttttaccgtccattctgatgttctacgccgtgaattacccttaatgttgttggtcagcgtggtggccggttccgtactctatgacggacaacttagtcgcagcgatggtatctttctcctctttctggctgtgctatggctgctgttcattgttaaacttgcacgtcaggctgaacgtcaggggactgacagcctgaccagagagcagcttgcagagctgccgcgtgacggcggattgcccgtcgcgtttttatggctcggcattgcgcttatcatcatgccagtggccacgcggatggtggttgataacgccacggtgctggcgaattactttgccatcagcgagttgacgatgggtctgacggcaattgctatcggaaccagcctgccggaactggcaaccgcaatagcgggggttcgcaaaggtgaaaacgacattgctgtcggaaatatcattggcgcaaacatttttaatattgtcatcgtgttgggtttacccgcgctgataacgccaggagagattgatccactggcgtacagtcgtgactacagcgtgatgttgctggtgagcattatttttgcgttgctgtgctggcggcgctccccgcaaccgggccgtggtgtaggggtattattaactggcggatttatcgtatggctggcgatgttgtactggttaagcccaatactcgttgaataactggaaacgcattatgagccacgtagagttacaaccgggttttgactttcagcaagcaggtaaagaagtcctggcgattgaacgtgaatgcctggcggagcttgatcaatacatcaatcagaatttcacgcttgcctgtgaaaagatgttctggtgtaaagggaaagttgtcgtcatggggatgggaaaaagcgggcatattgggcgaaaaatggcggcaacgtttgccagcaccggtacacctagttttttcgtccatcctggtgaagccgcgcatggtgatttaggcatggttaccccacaggatgtggtgattgctatctctaactctggtgaatccagcgaaatcacggccttaattccagtgcttaagcgtcttcacgtaccgttaatctgcatcaccggtcgcccggagagcagcatggcgcgcgccgcagatgtgcatctgtgtgttaaagtagcgaaagaagcctgtccgttagggctggcaccgaccagcagcaccaccgccacgctggttatgggcgatgccctcgctgtcgcgctgttaaaagcacgcggctttactgctgaagattttgcgctcagtcacccaggcggcgcactgggtcgtaaacttctgctgcgcgtaaacgatattatgcatacgggcgatgagatcccgcatgttaagaaaacggccagtctgcgtgacgcgttgctggaagttacccgcaaaaatcttggtatgactgtcatttgcgatgacaatatgatgattgaaggcatctttaccgacggtgatttacgccgtgtcttcgatatgggcgtggatgttcgtcagttaagtattgccgatgtgatgacgccggggggaatacgtgtgcgccctggcattctggccgttgaggcactgaacttaatgcagtcccgccatatcacctccgtgatggttgccgatggcgaccatttactcggtgtgttacatatgcatgatttactgcgtgcaggcgtagtgtaaagattcaaggataaacaacaatgagcaaagcaggtgcgagccttgcgacctgttacggccctgtcagcgccgacgttatagcaaaagcagagaacattcgtctgctgatcctcgatgtcgatggcgtactgagtgatggcctgatttatatgggcaataatggcgaagagctgaaagcgttcaatgttcgtgacggttatggcattcgttgtgcgctcacctctgatattgaagtcgctatcattaccgggcgaaaggctaaactggtagaagatcgttgtgccacattggggatcactcacttgtatcaggggcagagtaacaaactgatcgcctttagcgatctgctggaaaaactggcgattgccccggaaaatgtggcttatgtcggcgatgatctcatcgactggccggtaatggaaaaagtgggtttaagcgtcgccgtggccgatgcgcatccactgttgatcccgcgcgccgattacgtgacgcgcattgctggcggtcgtggcgcagtgcgcgaagtttgcgacttattactcctggcgcagggcaaactggatgaagccaaagggcaaagcatatgagtaaagccagacgttgggttatcattgtgctaagtctggcggttctggtgatgatcggcattaatatggccgaaaaagacgataccgcccaggtggtcgtcaacaacaatgatcccacctataaaagcgagcatacggacacgctcgtctataacccagaaggggcactaagctatcgattgattgctcaacacgttgaatattattccgatcaggccgttagctggtttacgcagccggtacttaccacgtttgataaggataaaatcccgacatggtccgtaaaagcagataaagccaagctgaccaatgaccggatgctctatttatatggacacgttgaagtcaacgcacttgtgccagactctcaacttcgcagaatcacgacggataacgcgcagatcaatctggtgacgcaggatgttacctctgaagacctcgtcacgttatacggaacaacatttaactccagcggtctgaaaatgcgcggcaacttacgcagcaagaacgccgagctgattgaaaaggttagaacatcctatgaaattcaaaacaaacaaactcagccttaatcttgtgcttgccagcagtcttctggccgccagcattccggcatttgccgtaaccggagacactgatcagccgatccacattgaaagcgaccagcaatctcttgatatgcaaggcaacgtggttacctttaccggtaatgtcatcgtcacccagggcaccatcaaaattaatgccgacaaagtggtcgttacccgtccgggcggcgaacaaggtaaagaagtgattgacggctacggtaaaccggcaacgttctaccagatgcaggacaacggtaaacccgttgaaggtcacgcttcccagatgcactacgaactggcaaaagattttgtcgttctgacgggtaatgcttatctgcagcaggtcgatagcaacattaagggcgataagatcacttacctggtgaaagagcagaaaatgcaggctttcagcgacaaaggcaagcgcgtaacaaccgttctggtgccgagccagctgcaggacaaaaacaacaaaggccagaccccggcacagaagaagggtaattaattcgttatggcaacattaactgcaaagaaccttgcaaaagcctataaaggccgtcgcgtggtagaagacgtcagcctgaccgtcaactccggggaaattgtcggtctgctggggccaaacggtgccggtaagaccaccactttctacatggttgtaggcattgtgccgcgcgatgcgggcaacatcattattgatgatgacgatatcagtctgctgcctctgcatgcacgcgcgcgccgcggtatcggctatctgccacaggaagcctccattttccgtcgcctcagcgtttacgataacctgatggcggtactgcaaattcgtgacgacttgtctgctgaacaacgtgaagaccgcgcgaacgagctgatggaagagtttcacattgagcacctgcgtgacagcatggggcagagtctctccgggggtgaacgtcgccgtgtagaaattgcccgcgcactggctgcgaatccgaaatttattctgctcgacgaaccgtttgccggggttgacccgatcagcgttatcgacattaaacgcatcattgagcacctgcgcgacagcggcctgggcgtgctgatcactgaccacaacgtgcgtgaaacactggcggtttgtgaacgcgcttatatcgtcagtcaggggcatttgatcgcccacggcacgcctacagaaatcttacaagacgaacacgttaagcgtgtataccttggggaagacttcagactctgatagggtagaagtttgcgacgttttagcaggagagtacgattctgaacatgaagcaaggtttgcaactcaggcttagccaacaactggcgatgacgccacagctccaacaggcaattcgtctgttgcagttgagcacgctggaacttcagcaggagctacagcaggcgctggagagtaatccgctgcttgagcaaatcgacactcatgaagaaatcgacacccgcgaaacgcaagacagtgaaacgctggacaccgccgacgcgctcgaacaaaaagagatgccggaagagctgccgctcgatgccagttgggacaccatttacaccgctggtacaccatccggcaccagcggtgactacattgacgacgagctgccggtctaccagggcgaaacgacgcagaccttgcaggattacctgatgtggcaggttgagctgacaccgttttccgacactgaccgcgctattgctacctctatcgtcgatgccgttgatgaaaccggttatctgactgtcccgctggaagatattctcgaaagtataggcgatgaagagatcgacatcgacgaagttgaagccgtccttaagcggatccaacggtttgatccggtcggtgtggcggcaaaagatctgcgtgactgtctgctgatccaactctcccaattcgataagaccacgccgtggctggaagaggccagactgatcattagcgatcatctcgatctgttagccaatcacgacttccgcactttaatgcgcgtcacgcgtctgaaagaagatgtgctgaaagaagccgtcaatctgatccagagcctcgatccgcgccccgggcagagcatccagactggcgaacctgagtatgtcattccagatgtgctggtgcgtaagcataacggtcactggacggtagaactcaacagtgacagcattccgcgtctgcaaatcaaccagcactacgccagcatgtgcaataacgcgcgcaacgatggtgacagccagtttatccgcagcaatctgcaggatgccaaatggttgatcaagagtctggaaagccgtaacgatacgctactgcgcgtgagtcgctgtatcgttgaacagcagcaagccttctttgagcaaggtgaagaatatatgaaaccgatggtactggccgatatcgcccaggctgtcgaaatgcatgaaagcacgatatctcgcgtgaccacgcaaaaatacctgcatagtccacgaggcatttttgaactgaagtatttcttttccagtcacgtcaataccgagggcggcggcgaagcttcctccacggcgattcgtgcgctggtgaagaaattaatcgcggcggaaaacccagcgaaaccgttgagcgacagcaagttaacctctttgctgagcgaacaaggtatcatggtggcacgccgcactgttgcgaagtaccgagagtctttatccattccgccgagtaaccagcgtaaacaactcgtttgacccaaccgataaggaagacactatgcagctcaacattaccggaaataacgtcgagatcaccgaggcactgcgcgaatttgttacagccaaatttgccaaacttgagcaatattttgaccgaatcaaccaggtctatgttgttctgaaagtggagaaagtcacccacaccagtgatgcaacactgcatgtaaacggtggtgaaattcatgccagcgcggaaggtcaggacatgtacgctgccattgatggcttaattgataagctggcacgccagttgaccaaacataaagataaactgaaacaacactaattgtccgggcaattagcatgtgcatggcggtctgttgtgcggcacaacgggccatttgtacggttaatgctccgagcctgttccactgtttgagtgggcaggttcttaggtgaaattatgacaaataatgatacaactctacagcttagcagtgttcttaacagggaatgtacgcgaagccgcgtccactgtcagagcaaaaaacgcgccctggaaatcatcagcgagctggcggcgaaacaacttagcctgccgcctcaggtggtttttgaagctatcctgacgcgggaaaaaatgggcagtaccggtatcggcaatggtattgccattccgcatggcaaactggaagaagatactctgcgcgccgttggcgttttcgttcagctcgaaacgcctatagctttcgatgccatcgacaaccaaccggtggacttactttttgccctgctggtgccggcagaccaaactaaaacgcacctgcatactctgagcctggtggcgaaacgtctggcggacaaaaccatctgccgccgtttacgcgcagcccagagcgatgaagagctgtatcaaatcattacggataccgaaggtactccggatgaagcgtaattattcggtaatgtctcttttagacgttgtgaggagaaacagtacatggtactgatgatcgtcagcggacgtagtggtagtggtaaatctgtcgccctgcgtgcgctggaagatatgggtttttactgcgtggataaccttcccgtagtgttgttacccgatctggctcgaaccctggccgatcgcgagatttctgccgccgtcagcattgatgttcgtaatatgccggagagtccagaaatattcgaacaggcgatgagtaacctgcctgacgctttcagtccgcaactcctgttcctggatgccgaccgtaataccttaattcgtcgttacagtgacacgcgccgactgcatccgctttccagcaaaaacctgagcctggaaagtgctatcgacaaagaaagcgatttgctggagcctctgcgtagccgagcggatctgattgtcgataccagtgaaatgtccgttcacgagctggctgaaatgctgcgtacccgtctgctgggtaaacgtgaacgcgaactgaccatggtctttgagtctttcggcttcaaacacggtatccctatcgatgcagattacgtctttgacgtgcgcttcttgccgaacccgcactgggatccgaaactgcgtccaatgacaggtcttgataaacctgtcgccgcgttcctcgaccgccacacagaagtacacaattttatctaccagacgcgaagctatcttgagctatggttacctatgctggaaaccaacaaccgtagctacttgacggtcgccattggttgtaccggcgggaagcaccgtagcgtgtatattgcagagcaactggcagactacttccgcagccgcggtaaaaacgtccagagtcgccatcgtacgctggaaaaacgtaaaccatgaccgtcaagcaaactgttgaaatcacaaacaagctgggcatgcatgcccggcctgcaatgaagctgtttgaattaatgcagggttttgacgctgaagtgctcttacgtaatgacgaaggcaccgaggctgaagccaacagcgttattgcgctgctgatgttggattctgccaaaggacggcagattgaagttgaagcgaccggtccacaggaagaggaagcactggccgccgttatcgccctctttaattctggttttgatgaagattaatcttcatcactttgacatacaactcccttcaaactccccccgacaataagaaaatcacgtactgaaatcgttctcaatcaacgtcatttgtacattttgtgcgcttttcactttcagaagaaccttaagaaaaccttaagaggcattgtttaggttttgtttaagttaatcgaccatactggagatcgtcagaaaatatttccaggagatggcatgattcgcttatctgaacaaagtcccctgggcaccggaagacatcggaaatgttatgcgcatccggaagatgcccaacgctgtatcaagattgtctaccatcgtggcgatggtggcgataaagagatccgccgtgagttaaagtactacgcgcatcttggtcgccggttaaaagactggagtggaataccgcgctatcacggtaccgttgagacggattgcggaaccggttatgtctacgatgtgattgcagattttgacggcaagccttccattacgctgaccgaatttgctgaacaatgccgttacgaagaagacattgcacaactgcgccagctactgaaacagctgaagcgttatttgcaggataaccgtatcgtgacgatgagcctgaagccgcagaatatcctctgtcaccgcatcagtgagagtgaggttatcccggtcgtctgcgacaacattggtgaaagcacattgattccactggcgacctggagcaagtggtgttgtctgcgtaagcaagagcggttatggaaacgatttatcgcccaaccggcgctggctattgccctgcagaaagatctgcaacctcgtgagagcaaaacgctggccctcactagccgcgaagcttaatccagctggtgttgttgcataaacggctcaccgcctaactgatacatctgccgtaaaatccacgcctgacggctacgcacgtagccgcttgggctggagactttgaaacgaagtggattaggtaatacagctgccagtaatgcagcttcgctccgggtaagtttgctcgcgggtttgtggaaataacgttgtgccgcagcttcgacgccaaacacaccgtcgccaaattcggcgatattcaggtaaaccgtcaggatacgctttttgctccagaccgtttctatccccagcgttaatccggcttccagcccttttcgaacccagctacgcccatcccataaaaagagatttttggctgtctgttgagaaatcgtactagcaccgcgaatacggttttcattgcgctcgttgtgcgccagggctttctcaatggaagcgacatcaaagccccagtgctcaggaaatttctgatcttctgcggcaatcaccgccagtcccatccacgggctgatttgatccatactgacccagtcagaatgtgccacgtaacgaaaattgccatgcagccaggcgctgacctgtcgctcgaccattaccgcactgaagggaacaggcgcaacgctaaacaacgcgatgcccccgccccagaaaacggcgaggacaaccattaaccgcaaaagaaaacggcgaacgaaactaaacaccgttaagcggcttttactcattcagccagaaccagcacgcgggaaaccagcttatcaatgccgctcgccgcttctgcaatgttctgcgccagcatatatgctggggtggtgacaatcttattgtcttcatcaaccacgatatcatcgacaggacacggcacatgctccgcgcccatctcttccagcacttctgcggtatcgatatcagtaccgatggtcaaacgcagcgggaaatcgaaaattttcggcagcatcgccggggcaatacacataaaaccaagcggttttccggcctgatgcatcgcttgtgccagcgcctttaattcacggtcaacggtgcattcgctaccaagactggcaaaattgcttaaattcttcgccgcgccaaaccccccccggcacaatcaacgcatccagttcagcggcatcggcctgggccagaggacggatttcaccgcgcgttattcgtgccgcttcaatcagcacattgcgcgtttccgtcatcgcttcgccagttaaatggttgataacatcaacctgctgcttatccggtgcaaagcagaccgcctgcgcaccgctgcgactaatagctaacaacgtcaacaccgcttcatgaatttcagaaccgtcatagacgccgcatccgctcagaattacgccaattttcttcattgtgatcatcctttcgcaattgactgaaacacattaatttttttaataaaaatggtacgcatcacacatttaactgattcatgtaacaaatcatttaagttttgctatcttaactgcgtgcggcctgaaaaacagtgctgtgcccttgtaactcatcataataatttacggcgcagccaagatttccctggtgttggcgcagtattcgcgcaccccggtctagccggggtcattttttagtggcttttgccacccacgctttcagcacttctacgtcgtgacgccactcttctttcatctcttcaatccattcaccgacgttatcttcccaggccggaaggtcaggagactgaatttgctgacccagctgttgcagatggcgtaaccccacactccccgccgcacctttaattttatgtccttcctcaacaatgccttttttatcctgcgccgtcagattgctctccagcacgctgacatagcccggcatcatcttctcaaacaccgctaacccgtcggtgatcagcttcggtcctacaagttcgagatactgttccagcatgggaatatcgagcaatgcttcacttttactgttctcttctgtcgtcaccgtactctcctcatcatcctgggtatcccagaatttcttgatcatcgcggttagcgccggaacagaaagcggcttactcagcacatcatccattccagcattgaggtactcttgtttgtctttcagcacgttagcggttaaggccaccagcggcggtaaatcctcgcgcggataacgtttcgtcagttcacgagagatatccagcccggtcatatctggcaactgaatatccagcaacaccaggtcgtattcgcccggtttaaacatctccagcgccgccttgccggtcatggcgacatcaacgctgttacctaatttttccagcacagaacgcgcaacaatcacgttcagttcaatgtcttccaccagcagcacattcagcgccggtaaaggcatatcgtcttcatcaaacgcatcatcgacctcttctgctacgctcggtgcgtggatcgtcaacgtaaaggtactacctttgccctgttcgctggtaaccgtaatatcgccgcccatatttttcgccagacgacgagaaacggccagaccaataccggtgccggtggcaggtttaccgccatgactgtctttcacctggtaatacatggcgaaaattttatccagctcatcctgcggaatgccgataccagagtcttccacttcaaaatgcagcatatcgccttcatcgtagcgcacgcgcacggtaacctggccttgctgggtgaatttgacggcgttactgatgaggttccacaggatctgccgtaaacgcgtcccgtcggtaatgacctgatgcggtaatggcagcgtcggctccaggttaaagcgcaatcctttttgttgcgcctgcaatgcggagagattttccagatcggcaaggaagctggtgaaatcaaccggttgattatcaagctggaccttgcgccgttccatcttatccatgtcgataatatcgttaaagatattccccagcgtgacggcgctaacatggatggtcttgagatatttttcctgctcggcggtgagttcggtatccagcagaatgcggctcagaccgacgataccgttcagcggtgtacgcaattcgtgactgatggtggagataaacgtcgttttgtcgcggctggcccgttcaagcgcatcctgataccgcttacgctcggtaatgtcgcgaccaaagcccatcaaaccgtgacgtttacccacgcggtcgtagtacggcactttacggatttcaaagcaggctttgcgcccgtccgggtaatccagccactgttcataggtcagactcacattatgacggaacactttttcatcggtttcaatgacttttgcggcggcttccggactgtaaacatcagcaggtttcaggtgaaccagttgtttttcgctttttccggtcagcagctccatcgcgcggttacagccggaaaactctttatcttcgttacgataaaaaaccaggtcgggactagcatcaaggaaggaacgtaagaaactggattgctgctcgagctgaatttgtgtctcttcgcgctctttgatttcaattttcagttggccgaaggtttcctgcagttctgcttccgctttttcacgaacggcaatttcctgatttagctgggcaatattatcttttaactgaacgttgaggctcaaatcgcgctcgcgcatctcctccagtttttgcaccagccgactcagacgttgtcgactctcctccagttgctcgacgaccacgcttagaaagtagaccgcccacggcgtaatcagcaaaccaaagaagatagaacgaataacatcaatgctttcgacctgaccatgcagcaccatggttaccgccatttgtaccacaatggcaagaacgacgagggccagcgccagcaacatactgaagcgcaccagacctaacttcatcatcaggtcaacataatactgcgccagcagacgaatttgcttcattagggaattccttcacgacaacctgccccaataatacccaattctgacagttacgttataaattgtgtgagaaatgcggaattcccctcaacgacttactccgttggaggtagccacggacgtcccagcgcgcttccctgtacgccatgttcattcagatagcgatccagctcgaccattcccgtccatcgattttcgcaccacagcggagcaagcagcgtcgggcgacgggcgctggcggaaatgcggtggtagatcacttccggtggcgtatggcgaatcatttctccggcagtgagcgtgtaatcctccagttcaataccgttcaaacgccccgcttcccaggctttcgccataatgctgcctttcacaatatgcagcggatgcagctttatgccgtccacgccggtttcaaccactcgctccagcgtttgcaaacattcagcctgcccttcgccaggcaggccgacaattaagtgggaacacaccttcagcccgcgctgacgtgccagctgggttgtacgctgataacaggcaaaatcatggccgcggttgatgcgatgcagtgttttgtcgtgggcggtttgtagccccagctccagccacacttcgtaaccctggtccttatattcgcaaagcagatccagcaccgcatccggcacgcagtccgggcgggtacccacacacaaaccgacaatattggcctggctcaccgcctgctgatacatagaacgcagcacctgaacttccgcaaaggtgctggtatacgcctgaaagtaggccagatagcgtttagcgcggttaactaaattcgcctggtgcgccagttgctcggcaatggaacgatgctgctgcgcttcatcggcaaagctggcaacattacagaatgtgcagccaccacgcccgatggtaccgtcacggttagggcagctaaaaccgccgtgcagcgtcagcttatgcaccttttgcccataacgacgggtgagatcaccaccaaacatattgactaatttctgtaactgcataatctgatagaccgcgccttgaaaagaggccaaagcctgccatttttagctcaattcggcgatgacctggatcaatcgtcccggcctgcttttatcaactgcataatcaatcaaaattaccgaaatttcatgcataatcacataaatcacttttgcttatcttgtgtcagatttttttatctcctgatggattttaggcaaaaacagtagcatgaaacgtcattaccaattaaggcagtataaaatgctggttttgtcgtcagttcaaggcaggataagggttaacacacctttatgacagtcaggaattgactgtttctctaacgacttcccttttagccttaaagataaaatccattttaatttcagtcatttaataaagaattttgcgctaaagcacatttctgtaccaataagcttgccatttgacctgtatcagctttcccgataagttggaaatccgctggaagctttctggatgagcagcctgctcatcatatttatgcagtaattgagatcccctcttcaccgtattaaccgatgcgaaaaggacaacaagggggcgaatgcgaggcgcgcgtatgacacgcaaaccccgtcgccacgctctttctgtgcccgtgcgcagcggtagcgaagtggggttcccgcagagcctgggggaggttcacgatatgttgtacgataaatcccttgagagggataactgtggtttcggcctgatcgcccacatagaaggcgaacctagccacaaggtagtgcgtactgcaatacacgcactggcccgcatgcagcaccgtggcgcgattctcgccgatggtaaaaccggcgacggttgcggcttgctgttacaaaaaccggatcgcttttttcgcatcgttgcgcaggagcgcggctggcgtttagcaaaaaactacgctgtcgggatgctcttcctgaataaagatcctgaactcgccgctgccgcacgccgcatcgttgaagaagaactgcaacgcgaaaccttgagcattgtgggctggcgtgatgtccccactaacgaaggcgtgctgggtgaaatcgccctctcctctctgccacgcattgagcaaatttttgtgaacgccccggcaggctggcgtccacgcgatatggagcgccgtctgtttatcgcccgccgccgcattgaaaagcgtctcgaagccgacaaagacttctacgtctgtagcctgagcaatctggtgaacatctataaaggtctgtgtatgccgacggatctgccgcgcttttatctggatcttgcggacctgcgtctggaaagcgccatttgcctgttccaccagcgcttctccactaacaccgtaccgcgctggccgctggcgcaaccgttccgctatctggcgcataacggtgaaatcaacaccatcaccggtaaccgccaatgggcgcgtgcgcgtacttataaattccagacaccgcttatccctgacctgcacgacgccgcaccgttcgtcaacgaaaccggctctgactccagtagcatggataacatgctggaactgctgctggcaggcgggatggatatcatccgcgccatgcgtctattagtaccacccgcctggcagaacaacccggatatggacccggaactgcgtgccttctttgactttaactccatgcatatggagccgtgggatggcccggcgggcatcgtgatgtccgacggtcgttttgccgcctgtaacctcgaccgtaacggtctgcgtccggcgcgctacgtcatcaccaaagataagctcatcacctgcgcctctgaagtcggtatctgggattaccagcctgacgaagtggtcgaaaaaggccgcgtcgggccaggcgaactgatggttatcgacacccgcagtgggcgtattctgcacagcgcagaaaccgatgacgatctgaaaagccgccatccatataaagagtggatggagaaaaacgtccgccgactggtaccgtttgaagatctgcccgatgaagaagtgggtagccgcgaactggacgacgacacgcttgccagctaccagaaacagtttaactacagcgcggaagagctggactccgtaattcgcgtactgggcgaaaacggtcaggaagcggtcggtagcatgggcgatgataccccattcgccgtgctctccagtcagccgcgcattatttacgactacttccgccagcagtttgcccaggtgactaacccgccaatcgacccgctgcgtgaagcgcatgttatgagcctcgccaccagtatcggtcgtgaaatgaacgtcttttgcgaagcagagggccaggcgcaccgtttaagctttaaaagcccgattctgctctactccgatttcaaacagctcacgacgatgaaagaggagcactaccgcgcagatacgctggatatcacctttgacgtcactaaaaccacgctcgaagcgacagtcaaagagctgtgcgacaaagccgaaaaaatggtacgtagcggcaccgtgctgctggtgctctccgaccggaatatcgctaaagatcgcctgccggttccagccccgatggcggttggcgcgatccagacccgtctggtcgatcaaagcctgcgttgcgatgccaacatcatcgtcgaaaccgccagcgcccgcgatccgcaccacttcgccgtgttgctgggcttcggcgcgacggctatttatccataccttgcctatgaaacgctgggccgcctggtagacacccatgcgattgccaaagattatcgtaccgtgatgctcaactaccgtaacggcatcaacaaaggcttgtacaaaatcatgtccaaaatgggcatctccaccatcgcctcttaccgctgcagcaaactgtttgaagcggtcggtctacacgatgatgtagtgggcctgtgcttccagggggcggtcagccgcattggtggagcaagctttgaagacttccagcaggatctgctgaatctgagcaaacgtgcctggctggcgcgtaagcccatcagccagggcggtctgctgaaatacgtccacggcggcgaataccacgcctacaacccggacgtggtgcgcacgctgcaacaagcggtacaaagcggcgagtacagcgactatcaggaatacgcgaagctggttaatgagcgtccggcaaccacgctgcgcgatctgctggcaattacgccgggtgaaaacgcggtcaacattgctgatgttgaaccggcaagcgaactgtttaaacgctttgataccgccgcgatgtctatcggcgcgttaagcccggaagcccacgaggcgctggcggaagcgatgaacagcatcggcggtaatagcaactccggtgaaggcggcgaagacccggcgcgctacggcaccaacaaagtgagccgcatcaagcaggtggcttccggtcgctttggggttactccggcgtatctggtcaatgccgacgtcattcagattaaagtcgcccagggcgcgaagccaggcgaaggcggtcagttgccgggtgataaagtcacgccttacatcgccaaactgcgctatagcgtgcccggagtgacgctgatctccccgccgccgcaccacgatatctactctatcgaggacttagcgcagctcattttcgacctcaagcaggttaacccgaaagcgatgatctccgtgaagctggtttccgaaccgggagtaggcaccatcgcgactggcgtggcaaaagcttatgcggacttgatcaccatcgcaggctatgacggcggcaccggcgcaagtccgcttagtagcgtgaaatacgcaggctgtccgtgggagctggggcttgttgaaacccagcaggcgctggttgctaacggcttgcgtcacaagatccgtttgcaggtcgatggcggcctgaaaacgggtgtcgatatcatcaaggcggcgattctcggcgcagaaagcttcggcttcggcactggcccgatggtggcgctcggctgtaaatatctacgtatttgccatctgaacaactgcgcaacgggtgtagcaactcaggatgacaaactgcgtaagaaccactatcacggcctgccattcaaggtgacgaattactttgagtttatcgcccgtgaaacccgcgagctgatggcacagcttggcgtaacacgtctggtggatctgattggtcgcaccgacctgctgaaagagctggacggtttcaccgccaaacagcagaagctggcgctgagcaagctgctggagactgccgaaccgcatccaggtaaggcactctactgcaccgaaaacaacccgccgtttgataacggcctgctgaacgcgcagttactgcaacaggcgaaaccgtttgtcgatgagcgccagagcaaaaccttctggttcgatattcgcaacaccgaccgttctgtcggcgcgagccttagtggctatatcgcccagacgcacggcgatcaggggctggcagccgatcctatcaaagcgtacttcaacggcaccgcaggccagagcttcggcgtgtggaacgcgggcggcgtggaactgtacctgaccggtgatgccaacgactatgtcggtaaaggcatggcgggcggcttaatcgccattcgtcctccggttggttccgccttccgcagccatgaagcaagcattatcggcaacacctgcctgtatggcgcgaccggtggtcgtctgtatgccgcaggccgcgcgggtgaacgtttcggcgtgcgtaactccggtgctatcaccgtggtagaaggcattggcgacaacggttgtgaatatatgacgggtggtatcgtctgcattctgggtaaaaccggcgttaacttcggtgcgggcatgaccggcggtttcgcttacgttctcgatgaaagcggcgatttccgcaaacgcgttaacccggaactggtcgaggtcttaagcgttgacgctctggcgatccatgaagagcatctgcgtggtcttatcaccgagcatgtgcagcataccggctctcagcgcggtgaagagattctggcgaactggagtaccttcgccactaaatttgcgctggttaaaccgaagtccagtgatgtaaaagcactgctgggtcaccgtagtcgtagcgcagctgagttgcgcgtgcaggcgcagtaaggggtagcaacaatgagtcagaatgtttatcaatttatcgacctgcagcgcgttgatccgccaaagaaaccgctgaagatccgcaaaattgagtttgttgaaatttacgagccgttttccgaaggccaggccaaagcgcaggctgaccgctgcctgagctgcggcaacccatactgcgagtggaaatgcccggtacacaactacatcccgaactggctgaagctcgccaacgaggggcgtatttttgaagcggcggaactgagccaccagaccaacaccctgccggaagtttgcggacgagtctgcccgcaagaccgtctgtgcgaaggttcctgcactctgaacgatgagtttggcgcggtgaccatcggcaacattgagcgctatatcaacgataaagcgttcgagatgggctggcgtccggatatgtctggtgtgaaacagaccggtaaaaaagtggcgattatcggcgcaggcccggcaggtctggcgtgtgcggatgtcctgacgcgtaacggcgtaaaagccgttgtcttcgaccgtcatccagaaattggcgggctgctgaccttcggtattccggccttcaagctggaaaaagaggtaatgacgcgtcgccgtgaaatcttcaccggcatgggtattgaattcaaactcaataccgaagtgggccgcgacgtacagctggacgatctgctgagtgattacgatgccgtgttccttggcgtcgggacttatcagagtatgcgcggcgggctggaaaacgaagacgccgatggcgtgtacgcagcgctgccgttcctcatcgccaacaccaaacagttaatgggctttggtgaaacccgcgacgaaccgttcgtcagcatggaaggcaaacgcgtggtggtccttggcggtggcgacactgcgatggactgcgtgcgtacgtccgtgcgccagggagcgaagcacgttacctgtgcctatcgtcgtgatgaagagaacatgccgggttcccgccgcgaagtgaaaaacgcgcgggaagaaggcgtagagttcaaattcaacgtccagccgctgggtattgaagtgaacggtaacggcaaagtcagcggcgtaaaaatggtgcgtaccgaaatgggcgaaccggacgccaaaggccgtcgccgcgcggagatcgttgcaggttccgaacatatcgttccggcagatgcggtgatcatggcgtttggtttccgtccacacaacatggaatggctggcaaaacacagcgtcgagctggatagtcaaggccgcatcatcgccccggaaggcagcgacaacgccttccagaccagcaacccgaaaatctttgctggcggcgatatcgtccgtggttccgatctggtggtgaccgctattgccgaaggtcgtaaggcggcagacggtattatgaactggctggaagtttaagcgaggtaacaatgaattcgccagactgtgtctggcgaatcaaattactgacgaagtgcgcgttgttttctggcaaatgcggcatgagcgtttgacctttcctataatagggataattttcaataaattgtgctttgttcaccaagtctgatgagtgaagcacatcaagcaatttctcatttacaatccgtctcaattacttgttaacacctctgacaataccgattctgcaagctattcagtcttttcattccatgtaaattgtctcgatattaatatacaaaatatgaatataaaaaaccaatatattatccttaattatctatatattttcctatttttcagcgcaaacattcatgtaatgaataattatcaccacaaaccacctcaccagcaccttattattcacatgatcgtaactataaaattcattaaataaatacaccccagcaagttggctatttctgaacgagttatttatttacattcacaaacagatatatatactgcttcagctttttattttaaaaaataaatttgttattaaggatatgttcatatgtttttcaaaaagaacctcacaacagctgctatttgtgcagcactttctgttgcagcattcagtgccatggcaacagatagtactgatacagaattaactatcatcggcgagtatacccctggtgcatgtaccccagttgttacgggcggcggcattgttgactatgggaaacatcataacagtgcgctgaatccgaccggtaaaagtaataaactggttcaactgggccgcaaaaacagcacattaaatataacctgcacagcaccaacgctaattgctgtaacctccaaggataaccgtcagagcaccattgtagcgttaaacgacacatcctatattgaaaaagcttatgatactctcgtagatatgaagggaacgaaaaacgcctttggtttaggttctgcgcctaatggacaaaaaattggcgctgcatccattggtattgacaggtctaatggtgggattcacgcggcggacgatacaggtgaaattcctgtcgacctgattcaaactgaccactggagtgcagcgacccccacatggaaagccagttctaatggcgcattctgcagcctgacaagttgcagtgcaatcgagcgcggttattctgttgcaaaaacaggggaactgacacctgttgctattacagcggtcaccttcccgttactgattgatgctgcggtaaatgacaatactattcttggttctgatgaaacgatcaaactggatggtaacgtcactatcagcgttcagtatttataagaacttgtaatacagtttttatttttacgcattaaccagttagctataactcggacagattatgccctatgacatggtctgtcttaatcaatctcatcgcaaacagtgcataacatatattaacaatatgtttctgcgttatttatcattattacaggagttttaatttaaatgctcagacacattacattcactgtatttataacaacatcaatgaatactaacaatgccggacaggagtactatcaggcattcgttttatacgatcggttaatgtttcaggaaagctcttcgcatatcttggggaaagtaaatgtaatacgctgttcttaattgttcagtgctcaccccccagagtatagctcattccattattcaacttagctccatataaagggacagataatggaaagcctcagtgaaggaaccacagcaggctaccagcaaatccacgacggtattattcatctggtcgatagcgcccggacggaaacggtacgtagcgttaacgcgttaatgaccgcgacgtaccaggaaattggccgacgaattgtcgaatttgaacaaggtggcgaggccagggctgcgtatggtgcgcagctaatcaagcgactaagtaaggatttatgtctaaggtataagcgtgggttctctgcaaaaaacttacgccaaatgaggcttttttacctcttttttcaacatgttgaaattcaccagacaatgtctggcgaattaacaccattgggaattccgcagacaccgtctgcagaattcccaagcgcaaagatttggcagacgctgtctgccaaatctttccccttgcccaggtccacctacgtccgtttactttccgttaaaaacgctgacgcccgcagcttttatgaaaaagagacgctccgctgtggctggtctgttcgccagctagagcggcaaattgcgacccagttttatgagcggacactactgagtcatgacaaaagtgccatgctgcaacaacacgctcctgccgagacgcatattcttccgcaacaggcgatacgcgatccctttgtgctcgaatttctggaattgaaagatgaatatagtgaatccgattttgaggaggcgctgatcaaccacctgatggatttcatgctggaacttggggatgattttgcctttgttggtcggcagcgaaggttacgcattgatgacaactggtttcgtgtcgatctgctgtttttccaccgccgtttacgctgcctgctaatcgtcgatctaaaagtgggcaaattcagctatagcgatgccggacagatgaatatgtatctcaactacgccaaagagcactggacgctaccggatgaaaatccgcccatcggtctggttctctgtgcagagaaaggagccggagaagcgcattatgctctggcaggtttgcctaacaccgttctggcaagcgaatataagatgcaactacctgatgagaaacgactcgcagatgaactcgttcgaacacaggcggtgctagaggaaggctatagacgccgttaatttcagcggtttcgaattctgcagacagtgtctgcagaatctttaaaacgaactaagttttaagccattaaatcagccttaaccttcaccacaacctttttaatctctccaggctcgccgacaacgcatcctggtttatgcggttcacctggcataaacacggcgaacattcccggttttaagatgatggcttgctcgttatcaatggtgctgcaaagctgataatcatcctcatggtggaactcttcacactgacgcgcagtgcctgccatgccaaacagaatccgttcctcaccgtttaataacagctggatatcaatgtattgctcgtgcaattccgcttttttctcgacggggctttgagtgttaaacgtcatgacattcataaagatattgtcgccctgtaattcgtaacgacccggcgctttttcttgcggtctggcagctaatgccagcgttaacgcgtcctgtaacgcaggatgtaacccagcagacggtaaactctgtacttcacccatcatcataatttttctccctgggccaacagcgtagccccaagtaaacctgcatcatggcggtaatgcgccgccagtaaatcaacatgaaatgccgctggctcctgcgccagatacgtttccaccagcgccagatacccttctgccagaccaacgctgccaccgaccaccacgcactggcaatcagttgtggctttaatatcagcgatcagccttgcaagcgtacgtgcggagcggtgaatcagctgctgcgcctgctcgtcaccctgcccggcgcgcgtgaaaatagttttcgcatccgcgccagccaactccccctgcgctgccgctgcaatgccgcgaccagaagcaatcgcttccacgcaacctgtgcgtccacagccgcagactgggccgtgtggatcggcaagcgtatgcccgatatgccccgccagaccgccagggccggtaagcagtttgcagccgctcactacaccgccgccaacgccggtggaaacggtgataaagaccatatcggttatatcgccatccagcgcctgaaactccgcccatgctgcggcctgcgcgtcgttaatggcaatggtcggcaaattggtaagttgttccagcgttttgactaacggaaagtgtagcaatccaccaagattatgcggattaagtgccagcaagctgccgtcacggattatcccggtgctagcgatggcaacccgctgcgcatgagcttgcaacggagagactaatgcggataaggcatcacgcaaggcttctggtgtctggctggctggcgtaggaagttcacgacgatcgcggatctgcccgtcagcgccaatcagcgcggcggcaagtttagtaccgccgatatcaatcgccagtgtggtcatagcaccgcctttttcatcgctgtgttgtaccactgacaaatgtgctcaagacgcgtgattgcagaaccgaccgtcaccgcccacgcgccgtggcgcatcgcatccgccgcctgagcaggcgtgttgtaacgcccttcggcaatcacccgacatccggcgtcgctcaacgttttcaccagcgccagatccggctcttctggcgtttcaggcgtggtatagccagaaagcgtagtgccaataatttcggctcccagcttttggcatgccaggccgtcttccggcgtactgcagtcggtcatcgccagtaaaccgtgatggtgaatacgtgccagcagcgtttcaacaggcaccggacgcgggcggtcggtgccgtcaatggcgataatgtccgcgcccgcctgcgccagcgcatcaacatcttcaatataggccgtgatgcgtaccggagaatcctccagatcgcgtttcacaattccaataatcggcacgctcaccaccgcacgcgtggcttgcagatttgccacaccttcaatgcgaatggcaaccgcgcccgcctgttctgccgctaatgccatggcggcgacgatttcgggtttatcgagcgggctgtccggaaccggctggcaggagacaatcaggccaccgttagcagcgattttttgatccagttgtgcaagtaagctcatacatcttcccttagcgaaaggcccggtacatagaccgggcaacaggattaacttttggttttgactaaatcgtttttggcgctgccaaacggcacggcaccgctgaatggtttaccgtcgatagcgtcatgagtacgcaacgcttccgggcgcaaccaacgctgaacgcgagaaggcatatccagcccaatcagcaggatcaccacgaacgtcagactgaagctgaggcttgccagcgcagtacccagatccagacgttgagcgatcaacgcgccgatgattggggccagtgcaccgcccaatgcgccaacgttgtaggtaaagcccaggcccgctgcacgctggtcggtatcgaaataaccgccaatcagttttggtaagatcccggcgatcccttgtccaagcatttgctggaagaacagtaacagaccgagcacccagacgtttgcgccgccaatcgcaaataccggaataatcagcagctggctggccagcaggctacaaacgtacgctttgcgggttcccagccagtcaccgaggaagccacctacgcagcatcccaccgccgcgccaaagccactaaagaacagcacattggctacagtatgcgggttataagccagatcggttttcagatacgttggcagcagcgcctgaatcggccaactgtagaggaaagcaaacaacacgaccaccatcagcattacgcccgttggccagcgtttgcctgcactctgcaccataaagctgataaagattgcggcgcataacagcccaagaacagcgacgatcgcggcattttgcaggttaccggcgaagcagaaccacagcgcagtagccgccgccagtgtcattacgatattggcaatgcgatgttcaccacggtagagaatatccaccattgtgcgtactggtgctttacctgcgtgtttctctttccagtcttccgcttccgggatgtttttacgcagccagagagcaaagatgattggcaaaatgccgataaagaacagcgcacgccagccccagaccggaaccaccaggctatagacctgagcggcaacgacggcccccacagagaagccactaatcaaaaaaccactggctttgttacgcagatgttttggccagctttcaatgacataggtggcgctggaaccgtattcacccgccatccccatgccgatgaccagacgagcgataaacatggtgatgtagcctggcgcaaagccgcaggccagcgtcccggcgctgaagagaacgatgctggtgaccattgccagacgacgcccgtagcggtcacccatagcgccgagcatcaggccgccgaaccagcgagagataaaggctgcagagatcagacttgccgcctgcaccgtcgtcagcccgaattcaccttgtacttcggtgagtaccagggcgattaaaacgaaatcaaaaccgtcaagcagatatcccaaccaggcagcggaaaatgcgcgccattgtgcacggttgagatggcgataccacgggatattctgggttgtagtactcattgtgagtctcccgcggtgggcgatgcccacacgctttggtatgaaaattgtagggtacagatgcgtttatttcccctcacccggtaggggcgagcgaggggaaacaactcacccgcgctcttgcatcaactgctgggccagcgccttcagttctggcagatatttttcatctaccggtccaaacggtttgcggcacagcggcacagaaacgacatccatataatggaggacagttttcaggccgcggaatacgcccgttttgatcagtaaatcaatgactttattgcattcagtttgcagtttctgcgcggtctggatatcgccttctttcagcgccttaacgatcccctgatagcgccagcccatgatgttgtaggtactgccgataccaccatcagcgcccgccagcagaccagaggcgaagatttcgtcgtaaccgttatagagcacaagatcaggatgttcacgacggatctgctccatctgatagagatcgccagaggtctgtttcagcgcacctacgccaggcaatgtaacaagtgtgttgatctgatccagggtcagttttaccccactcagggctggaatgttgtacaccaccatcggcaaaccatccgcgctatcaataattgcccgatagtgatcgcagtgttcttcaaagctgaaaggatagtagaacggcgtgacggcggagacggcatcgaagccataacgtttagcgcttgccgcaagttgttggctttcggcggtgctgacgcaaccgacgtgggcgatgagtttaatcttacctttcgcctcttcggcgacgatttccagtacctgttcacgctcggaaaggctttgtacaaaggcctcgccggtgctaccacccacgtataaaccgtcgatgccctgctgaatattgaactgaaccaggcgacgcagactcgctttatccagtgcttgttgttggtcaaaaggagtcaggagtgcagccattacgccacgtaaattcgttgccataaatacctctgaagtgatgcttgtctgataaacgatatacctttatacctgttataccagatcaattaagcaacaccccatacagaaagcttataatgcgatctgcttcactaaagtggcattatttctttttgttggtggtctgaccgaaagcgtgccaggtagcagagacgctgttgagatggctttgcaacgcacgatcggcttcgtcaggatcatgacggcggatcgcatcaacgatcgcaatatgctgttgataactaacgttgttatgttcgtgcagtgcctgatcggtaaccgttgggcgtgcggcaataagccagtcgagcagggcaacgtggatcgccatgaagattgggttaccggggatctccgccagcacgcggtggaaatcaacgtcactacgaatgaatgccgcgttgttatccaggctctgactgttgatttccagtgcttttgccagcaaatcgatttgctcatcggtggcatgttcagccgcatagcgcaccagactggattcaaagaacagacgtaattgttcgaaatgggcaatcccaccgggatgagaaaggaaatctttcgccatgccggaaagctcaccgatgatagtgtccgcagaaggacggctgacgcgagcgcgttcgccgttgtttatttgcaccagacctttgcgttttaacgctgccagcgcttcacgcacgctaggacgcccgacgttaaagaacgccatcagttcgcgttcagacggtaattgttcaccttcgccaaattcacgacggcggatcatctgttccagctcttcttccaccatttcggagagttttttacgcgccagcgggcggctacgcaagttgcgaccaattgcaggactagaatcttcggtttggctatcaaatgcgttcataaggcccattctgtaaggtcagtgtgattaacatcatcagtgacatcctatcacaggattgaaagtaggggaaaatggcagggttttctctttgtgcctcatcattaccataattaacggaataattaactattgcgaaaaattaatgtaacgcagataaaaacatcccgtttgaattatttataagactattcacgagcattatgaatattatgaatgtgttcttacaaaataatcataagcgcatattttttaatgaaaaatcacctcacctacaattaaaaacacgacatccgcaccataaatagccttgcaaaaaatataacatcgttgttttcaatctgccgtttatgggattgaccgttttcttttgacacggagttcaacaatgttcggcataattatatctgtcatcgtattaattacgatgggctatttgatcctgaaaaactacaaacctcaggtggtgctggctgccgcaggtatcttcctgatgatgtgcggtgtctggttagggttcggtggtgtactcgatcccaccaaaagcagcggctacttgatcgtcgatatttataatgaaatcctgcgcatgctgtccaaccgcattgccggattggggctgagcattatggcggtgggcggttatgcccgctacatggagcgcataggggccagtcgcgcgatggtgagcttgttaagccgcccgttaaaactcattcgcagcccgtatattattctgagcgcaacttacgtcatcggccaaatcatggcgcagtttattaccagcgcctccggtctgggtatgttgctgatggtcaccttatttccgacgctggtgagtctgggagtaagtcgtctctctgcggtggcagttatcgcaaccacgatgtccattgagtgggggattctggaaacgaactccatttttgctgcccaggtagcgggaatgaaaattgccacatacttcttccactaccagcttccggtcgcctcttgcgtcattatcagcgtggcgatctcccactttttcgtgcaacgcgcttttgacaaaaaagataaaaatatcaatcacgaacaggcagagcaaaaagctctcgataatgtcccgccgctctattacgccattttacctgtgatgccgttaatcctgatgctcggcagcctgttcctcgcccacgtcgggctgatgcagagtgaactgcatctggtggtggtgatgttactgagtttgactgtgacgatgtttgttgagttcttccgcaagcataacttgcgcgaaacaatggacgatgtgcaggcgttttttgacggcatgggtacgcagtttgccaacgtggtaacgctggtggtcgcgggtgaaatatttgcgaaaggcttaacgacgattggcactgtcgatgcggttatcaggggggcggagcattctggtctgggcggtattggcgtgatgattattatggcgctggtcattgccatttgtgccattgtgatgggctctggcaatgcgccgtttatgagttttgccagtcttattccgaatatcgcagccggactacatgtaccagcggttgtaatgattatgccgatgcattttgccacgacgctagcgcgcgcggttagcccgattactgcggtggtggtcgttacgagtggaattgcaggcgttagcccttttgcggtggtgaagcggacagcgatccccatggcagtcggtttcgtggtgaatatgattgccacaatcacgctattttattaagtcattaaaaagacaaaacaggccgcctgggcctgttttgtattacttcacaacgcgtaatgccggtcgaccaccgcgtggtggctgcggaggttcatcgtcaggatgagtgtcatcatcgtgatctggcttgtcgccatcaataacgctcataacggtttcgttgtctgcgcttgcctcttcatcattcatgatgctggtatcttcatcgtaggcagcttcaggctcaaacatcgtgcctgcgccattttcacgggcgtagatagccagcacggcagccagcggcacagaaacctgacgcggaatgccaccaaagcgcgcgttaaagcgcacctcatcattcgccagttccagattgccgacagcacgcggcgcaatgttgagtacgatttgcccgtcacgcgcatattccataggaacctgcacgccagggagcgtcacatccaccaccaggtgcggcgtgagctggttatccagcaaccactcatagaatgcacgcagcagatagggacgacgtggtgttagctgactcaaatccatacagattaactccggcccagacgcatttcacgttctgcttcagttaaagaagcaaggaaagagtcacgctcaaagacgcgggtcatatagcctttcagctctttcgcacccgggccgctgaactcgatgcccagttgcggcagacgccacagcagcggagcaagatagcaatcgaccaggctgaactcatcgctcaggaagtacggcttctgaccgaagaccggcgcaatcgccagcagttcttcgcgcagttgcttacgtgcggcatctgcttcagaagcactaccgttgatgatggtgttcatcagcgtgtaccagtctttttcgatgcgatgcatgtacagacggctttcaccgcgagctaccgggtaaacaggcatcagtggcggatgcgggaaacgctcatccagatattccataatgatgcgagattcccacagggtcagctcacgatccaccagggtcggaacgctctgattcgggttgaggtcaatcagatcctgaggcggattgtccttttccacgtgttcgatctcgaaacttacacctttctcagccagcacaatgcggacctgatggctatagatgtcagtaggaccggaaaacagcgtcattacgctacgtttgttggcagcgacagccatgaaaacctccaggtatagtcagaatttttactgctaccagccaccaggtggccagtcagaagttgtgttacccaataaggaacgactctctttgttcgaaaatcaaacaaaaaatgagcaatacccgacatttgggcagaaaattggatgatagtttaccagattttgcgaccattgtggtgagtcgatgccggaaatggggaaaaagagatgcgctttagtctgaaatagttgacttagtcccttattggcgatgtggtttttgttttacctgtctgtcaggtggcagcaaaaagcaactttccagtttttacgctgattcagattttagctataaaaaaacccgccgaagcgggttttttcgaaaattgttttctgccggagcagaagccaattaacgtttggagaactgcggacgacgacgtgctttacgcagaccgactttcttacgttcaacctgacgagcgtcacgagtaacgaagccagctttacgcagttcagaacgcagggactcgtcgtattccatcagagcgcgggtgataccgtgacggatcgcaccagcctgaccagagataccaccacctttaacggtgatgtacaggtccagtttctcaaccatgtcgaccagttccagcggctgacgaactaccatgcgggcagtttcacgaccgaagtactgttccagagaacgttggttgattacgattttaccgttgcccggtttgatgaaaacgcgagctgcggaacttttgcggcgaccagtgccgtagtattgattttcagccattgcctataatcccgattagatgtcaagaacttgcggttgctgtgccgcgtggttgtgctcgttacccgcgtaaactttcagtttacggaacatagcacgacccagcgggccttttggcaacatgcctttaaccgcgatttcaatcacacgctcaggacggcgagcaatcatctcttcaaaggtcgcttgtttgataccaccgatgtggccggtgtggtgatagtacactttgtcagtacgcttgttgccggttacagcaactttgtcagcgttcagaacgatgatgtaatcaccggtatctacgtgcggagtgtattccgctttgtgcttaccgcgcaggcgacgagccagttcagtagccagacggcccagagttttaccggtcgcgtcaacaacataccagtcgcgttttacggtttctggtttagctgtaaaagttttcattaaaagcttacccaataaatagttacacgttggtgaacacccaaacgtcttcaattgttgaggttcacacgacaaagtccggcaaacctaccccttcgaatagcctatgccagcacacaaaaagttttgggaaaaaaactttcttgtaacgtggggtcgcaggattatagagaagtcggggtcaaagatcgacccctttttgtgatttgtgacaggttttaacccgccaaatgctcgcgcttcagatactcttcgctttgcatctcttgcagacgactcaggcaacgctggaactcaaacttcagccgatcgccctgataaatttcatacagcggcacttctgcactcaccactaatttgacatggcgctcgtaaaactcatccaccagcgcaataaagcgccgcgcttcgctctccatcaaccgcgtcataactggtacatcaaacaacatgaccgtatgaaagagacgactgagcgcaatatagtcatgctgactgcgggcgtcgacgcacagcgtagtaaaagagaccgccagcgtctggttctcgacgcccattgttgctaatggccgatggttgatttctaacgtcggactattttctcgtttcccccccgccagcgccaaccatagtttatccatttgcgcccgggtttcatcgtgaagtgggctaagccacagatgcgcctgagtgagtgtacgcagacgataatcaacaccagcgtccacgttcattacatcacaatgctgtttaatggcatcgattgcaggcagaaaacgcgcacgttgcaggccatttcgataaagttcatccggcggaatattactcgtcgctaccagggtaataccgcgagcgaacagggctttcatcagaccgccaagtagcatggcatcggtaatatcagaaacaaaaaattcgtcaaaacagagcacgtcagtttcggctttaaagcgatcggcaataatttccagcggatcggtctgcccctgtaaggcagttagctcttcatgcacccgcagcataaaacggtgaaagtgcaggcgctgtttccgctctcccggcaggctttgatagaaaaggtccatcagccaggttttcccgcgtcctacaccgccccacatatataagccacgcactggcgtatgctttgtgtcttcgcgtttaccccacagcttaccgacccgcgccattagcccactcgtcctgggggctggtggcgtgctattgatgagttcctgataaataatttccaggcggctgacggcctctttttgaacgtcgtcgggttgatggctgccttcattaagcgccttcaggtattggcttgttggggtaacgctttgcatgatcttattgttattccttgaataatcggtgcgccgttgttcacggttgacgaaaaaaaggccgttctacactacgcgatatgcagtcgggattccacttctgtggaattaacggttatagtggcataatcagccgcaggcatggagcctgaagccaacaccctacggaaacaaaagacaacgggagatgttcatgacctgggaatatgcgctaattgggttagtcgtcggcatcattattggtgctgtggccatgcgttttggtaatcgtaaactacgccagcaacaggcgttgcagtacgaactggaaaagaataaagctgaactggacgagtatcgcgaagagctggttagccactttgcccgcagcgcggaattactggataccatggcgcacgactatcgccagctgtatcagcacatggcaaaaagctccagcagcctgctgccggaactgtctgctgaagcaaacccgttccgtaatcgtctggcagagtctgaagccagcaacgatcaggcaccggtgcagatgcctcgcgactattctgaaggcgcatccggcctgctgcgtactggcgcgaagcgcgactaatttatttttcgggcgcagccattgcgccctcctcttctctccctccccgactatcatttaatctggtgtctcattgttagccgtctgaaaattcaataacatcaaactgttttgaatctcttttcttatcattcaggtacgagagcaggaataatgaaaaaacaaacccagctgttgagtgcattagcgttaagtgtcgggttaactctcagcgcgagttttcaggccgtcgcgagcattccaggccaggttgccgatcaggcccctctccccagtctggctccaatgctggaaaaagtgcttccggcagtggtgagcgtacgggtggaaggaacggccagtcagggacagaaaatcccggaagaattcaaaaagttttttggtgatgatttaccggatcaacctgcacaacccttcgaaggtttaggctccggtgtcatcatcaacgccagtaaaggctatgtgctgaccaacaaccatgtgattaatcaggcacagaaaatcagtattcagctcaatgatgggcgcgagtttgatgcaaaactgattggtagcgatgaccagagcgatatcgccctgttacaaattcaaaacccgagcaaattaacgcaaatcgctattgccgactccgataaattgcgcgtcggtgattttgccgtagcggtcggtaacccatttggccttgggcaaaccgccacctctggcattgtttccgcattaggccgcagcgggttgaatcttgaaggtctggaaaactttatccagacagatgcttccattaaccgcggtaactccggcggtgcactattaaaccttaacggtgagttaattggcatcaacactgcaatccttgcgcctggcggcgggagcgtcgggattggatttgccatccccagtaatatggcgcgaacactggcgcagcagcttatcgactttggtgaaatcaaacgcggtttgttaggcatcaaaggcaccgagatgagtgccgatatcgccaaagccttcaaccttgacgtgcagcgtggcgcgtttgtcagcgaagtgttgccaggttctggcagcgcaaaagcgggcgtcaaagcgggcgatattattaccagcctcaacggcaaaccgctgaatagctttgctgagttgcgctctcgtatcgcgaccaccgagccgggcacgaaagtgaagcttggcctgctgcgtaacggcaaaccactggaagtagaagtgacgctcgataccagcacctctagcagcgccagcgctgaaatgatcacgccagcgctggaaggtgcaacgttgagcgatggtcagctaaaagatggcggcaaaggtattaaaatcgatgaagttgtcaaaggaagcccagctgctcaggctggcttgcaaaaagacgatgtgatcattggcgtcaaccgcgatcgggtgaacagcattgctgaaatgcgtaaagtgctggcggcaaaaccggccatcatcgccctgcaaattgtacgcggcaatgaaagcatctatctgctgatgcgttaatgtcgtaaaccgggcatcaggcttacgtgtgatgtccggttaactcgtggtatgctgctgccgttcccttttttaatgacgcctccatcatgtttgtgaagctcttacgttccgttgcgattggattaattgtcggcgctattctgctggttgccatgcctagcctgcgcagccttaacccgctttccactccgcaatttgacagtaccgatgagacgcctgccagctataatctggcggttcgccgcgccgcgccagcggtggttaacgtttacaaccgtggtttgaacaccaactctcacaaccagcttgagatccgcaccctgggatccggtgtaatcatggatcaacgcggttatatcatcaccaataaacacgtcatcaacgacgccgatcagatcatcgtcgccttacaggatggacgtgtatttgaagcattgctggtgggatctgactctctaaccgatctggcggtacttaaaattaatgccactggcggtttacctaccattccaattaatgcacgtcgcgtaccgcacattggcgacgtagtactggcgatcggtaacccgtacaacctcgggcagaccattacccaggggattattagtgccacgggtcgaatcggtctgaacccgaccgggcggcaaaacttcctccaaaccgatgcttccattaaccacggtaactctggcggcgcgctggtgaacagcctgggcgaactgatgggcattaatacgctgagctttgataagagtaacgatggcgaaacgccggaaggtatcggctttgcgattcctttccagttagcaaccaaaattatggataagctgatccgcgatggtcgcgtgatccgcggctacattggtatcggcggacgtgagatcgcaccactgcacgcgcagggcggtggtatagatcaactgcaagggatcgtggttaatgaagtgagtcctgacggcccggcggcgaatgcgggtattcaggtcaacgatctgattattagcgtggataacaaaccggccatctctgctctggagacgatggatcaggtggcggaaattcgccctggtagcgtgatccctgtagtagtgatgcgtgatgataagcagttaacgctgcaggtcaccattcaggaatatccggcaaccaattaagtcgtgcgctcaaaacaaaaaaccggagtctgtgctccggttttttattatccgctaatcaattacttattaacgaactcttcgcccagggcgatatctttcttcagcgtatccagcataccttccagcgcgttctgttcaaatgcgctcagggtaccgatagatttacgctcttccacgccgtttttacccagcagcagcggttgagagaagaaacgggcgtactgaccgtcgccttcaacgtaggcacattcgacaacgccttgttcgccctgcagtgcacgaaccagagacagaccaaaacgtgcagctgcctggcccatagacagggttgcagacccgccaccggccttcgcttcaaccacttcagtacccgcgttctggatgcgtttggtcagatcagccacttcctgctcggtaaaactaacgccaggaacctgactcagcagcggcagaatggtaacaccagagtgaccgccaataaccggcacttcaacttcgcctggctgtttgcctttcagttccgcaacaaaggtgttggaacgaatgatatccagcgtggtaacgccgaacagtttgtttttgtcataaacaccggcttttttcagcacttcagcagcaattgcaactgtggtgttaaccgggttagtgataataccaatgcacgctttcgggcaggttttcgcaacttgctgtaccaggtttttcacgatgccggcgttaacgttaaacaggtcggaacgatccatacccggtttacgcgctacgcctgcagagataagaacgacatctgcgccttccagcgccggagtcgcatcttcaccagaaaaacctttgattttcacagcagtagggatatggctcagatcgacagccacaccgggagtcactggagcgatatcatacagagagagttcactaccactaggcagttgggtttttaacagtagtgcaagcgcctggccaataccgccagcagcgccgaggactgcgactttcatcctaaactccttattatattgataaactaagatatgttgctccgctgccgcgaccttaatccacaaaattgccgtttacaatgaccacatctcaagaatgtgtagtcacgcaagtttagcgtttatgcatttaattgccgtaatcaggaacctaacttacgtaattaacagtcgcttatgcattagcgcaacattccaacaggtggtgacaatataccctaccgttcagccaaaacaacatcaatttgataacaattaatttacttttaagcagaatttgcatgccgtgacgcaggcatgtttctcaataacgaaatttgataaaatcccgctctttcataacattatttcagccttcttcagggctgactgtttgcataaaaattcatctgtatgcacaataatgttgtatcaaccaccatatcgggtgacttatgcgaagcagcgctaagcaagaagaactagttaaagcatttaaagcattacttaaagaagagaaatttagctcccagggcgaaatcgtcgccgcgttgcaggagcaaggctttgacaatattaatcagtctaaagtcagccggatgttgaccaagtttggtgctgtacgtacacgcaatgccaaaatggaaatggtttactgcctgccagctgaactgggtgtaccaaccacctccagtccattgaagaatctggtgctggatatcgactacaacgatgcagttgtcgtgattcataccagccctggcgcggcgcagttaattgctcgcctgctggacagtctgggcaaagcagaaggtattctgggcaccatcgctggcgatgacaccatctttaccacccctgctaacggtttcacagtcaaagacctgtacgaagcgattttagagctgttcgaccaggagctttaatctctgccccgtcgtttctgacggcggggaaaatgttgcttatccctctcaaccccctgctttcccctgcgattaatttaacgaatagtgcgttttactgcgacatgtcattcacacaatgaatacataaggtaaaaaaagcacattatgcaaaattcattatctaattgaaaaaactagaattaacgataaataaccgtatttttaattcttttttgttattaaaattcacatttttaacacttagtatcaactgaaacagttagcgcggtattaattagctcaataattagtgtatacttgattttgtgatatgggtcacgaaacaaaggcccagctaaaagattatgtcgaggtaaaaatcatgaaaatcaaaaccactgttgctgcattaagcgtactttctgttctctctttcggtgcattcgctgccgactccattgatgctgcacaagcacaaaatcgtgaagcaatcgggaccgtatccgtaagtggtgtggcgtctagcccaatggatatgcgtgaaatgctgaacaaaaaagcggaagagaaaggcgcaacggcctaccagattactgaagctcgtagcggtgacacctggcacgctacggctgaactgtacaaataaaccctcatcgtcttgtccgacgatattgcccccggttcgggggcttttttttgcgttaatgacgaacattaaaacgcaaatgcccttccagctcttcctctgcctcatcaaacagcaatattaacgcgccaaaacggcgacgcgttttctctcccagatgaacaaattcaatctcaagtggtagcggcaggacatcgttcattaacacatcccatagactgtcgagatcgcgtaccttatctttcgccagaccaaaggtttggctaaagtcacgataaaaatcctcctgactctcaatctcatcaaaatcaaaggtataaatattcatctgttgccaccgtcacgtttcgcggcgagttctgccgtgcatcgctaagtatagccatgaaaaaaccgacgcttttggcgtcggttttgacttaactatcggtcaacgcatgttgatacttatggagcatccccgccagccgatttaccggttccgtcacctgcggtggcgcttgccagatgcgtagcttttcctggtagatttccagttcttccagcaactggccaaagtaccgacgacgtttatcatcgctacgggcagatatcacatggtctgctgtgcggcgcatttgtcggtgaaacgcgcttaaatcctcgttaaccgggatcggtgcatcacgcaggcgctggtgcgcgataatcatcgtcagcgccaggcgaaatttcggcaaatcccctgggaacttattcatcagcaaaaacagctgctgataaagtgccgggaggtggttctctttacgacgtgccacattggtagtcatcgcggaaacagcggcagaaacaaactgattaagcagtacacgtccggtcctgtcgcggcttttatcccgcaccagcaaaataacggtgaacgcgagcacacagccgacgatttgccctaatgcgctgtcgagaaactgactgaaatggaaagtcatcgggttatccagcacgataatatttatggtgctggccagtgcccccatgctgcccagtcgccgtttctgtacttctataccgaggaagaatcccagcactgccaggctaatgcacagcagcaacatgctctgttgggtattagggataatcaccaaaaagtagagcagccctaacggcagcgcggccagcgtcccgtagataaagtcgatcgccaccatgcgtggattcggcaaacgcattgccagactcgtcactaccgcaatcatcaccattgcaccactgccggaagtccagcccgtccacagccagaaaagcgtgcccagaatgcaggaaagtgtggttcgccagaagttacccattgcatgatgacgttcggcactctctacttttacttccggttcgccttgcaggatctcttcttcggtggcgttgatttttgtgttactgataacgccgcgcttgagaagctgataacgcgttgccgccgcgacccagctataaatggtgacaggcgtttcccgttccccggtccaggcgataactctccgcaggcgtttgagctgcttgtggacgtcctgcgcggtttctaccggcgtgtcaaaaaattcgcggaaagtatcagtgatcaattccgggcgcgtattctgaataagataagtttcgcaggattgggtaatcagcgtcaggcttagcgtattgatcgcttttaaacgtcgattggcccgcgcccagcgggaagattccatattcaggttgctgcgcatgccttgtagcgccgtggtgcgtcgcaccaggtcgccccaggctttatcgacaacttcaccatcgccatgcttgatacagagttgcattaattgatattgcgcgaccagcaaactttccagctctcgatccacttcttgtttgatgcttcgcggagaaaagagcaaatccgccataatcgcacacacaataccgataacgatctcgctacaacgttcgacggcaaactgcggcgtaagcaatggttccggctgaatggtgatcacaatgatcagcgcggtataaccggccagcccccacgcatagctgttttctattcgtaccaggctggatatccaggtacaaaaaccggcccagatacagcacaccagaatcatcaataatggtgcgcggatcatcgcaatgatgatcaccagtccggcaatacagccaataaatgtgccgatgatgcgcaaaaagccacgatagcgaatagcgccagaatacggttcacctcccgcagcaaaggccgtaccggcggcaacaatcgccgctgtcagtaccgcccagcgtggcgtttccagctggaagtgaaagccaacaaacagcgccagtacaatggcggtcgccagttttaccgcaaagcgaatatgttggttagcaatggagaaaatacccatcgtgattaaccaaactcacgcaggcgatgggccattttacggaagaagctatcctggctttcgtcgcgatcttgtttgccagtgaccaccactgtagcagtggtgcccgcaggccagatgttctcttgctggttgtcgagacgaatacgaaccggaacacgttgcgcaagacgcacccattcaaggttagagtctatagtcgccatccctttgtcgtcacgcgtgctgctggcgttggtgacccctgcggcaacactatcaacagtccctttcagcactttgttactgccaagcggcgtgatctctgcacgataccccggacgcaccccttccagcttagtttcttccatataggccagtacatagaaggagttctgtttcaccagcgcaaccgccgtacttcctcgagtaataaactcaccggtatagacgttgaggttggtcacccagccatctgctggcgcgcggatcaccgtgcgttcaagatccagttttgccagatcgcgggtcgcctgcgctttcgctaactgatgcagaaccgtttgtagtacgttgttggcctggtcgatctcttcgcgagacatcgcctgcacaccgagacggttacgacgtccggcctcctggcgtttctcctgtgccagtacctgataataagcaacatcggcttgcgcttcctcaagcgccttttgatagcgcggctggtcgatggtgaacagtatctgtccttttttcaccagctggttatcatgaacattcacctgggtaatgagtccagaaacgtccggcgcgatcgcaacgacgtcagcgctaaagcgcgcgtcacgcgtccagggggattcggtgtaatagacccaggcattaaaaattgcgatgaaggccagaatgactaatacgaccgtgatggccgtacgggagaattttcttattagtgttttcacttcaacctcaaacgaacagtcggcttatcaaataaaacaagcagcaatagagcgcggtgttgaacaacgccggatgccagacaaagtcgtagatacctgttggcacaagtacccggcgcaccagccagaaaatcgccagacttaaaagcaattcaaaaaatatcggtgggaaggacagcccaaacaccacgataacgggaaacagactcatgttgaccttggttgtaaagagagagcaggcgttattattttcagcatctgtcgccgcagagaagggcatggaaagccgggcgagagcaacattgctgtagattgatatttaatatattagcgtaactgttatgctgttatctatattatgtgatctaaatcacttttaagtcagagtgaataatggaacgactaaaacgcatgagcgtgtttgccaaagtagttgaatttggctcttttaccgccgccgccagacagctacagatgagcgttagctccatcagtcagacggtaagtaaactggaagatgagttgcaggtaaagctgttaaaccgtagcacacgcagcattggcctgaccgaagccggtagaatttactaccagggctgccgtcgtatgcttcatgaagtgcaggatgttcatgagcaactgtatgccttcaataacacccccatcgggacgctacgcattggctgttctagtactatggcacaaaatgttctcgccgggctgacagccaaaatgctgaaagaatacccaggtttgagcgtcaatctggttaccggaattccagcccccgacctgattgccgacggtctggatgtggtgatccgcgtcggcgcgttgcaggattccagcctgttttcccgccgtctgggcgcgatgccaatggtggtgtgcgccgcgaaaagctatctcacacaatacggcataccggaaaaacccgccgatttgagtagtcatagttggcttgaatacagcgtgcggcccgacaatgaatttgaactgatcgcaccggaagggatcagcactcgcctgatcccacaaggaagatttgtgactaatgatccgatgacgctggtgcgctggctgacggcgggtgccgggatcgcctacgtgccgctgatgtgggtgatcaacgagatcaatcgtggggagctggagatcctgctgccgcgttaccagagtgatccacgcccggtttatgcgttatataccgaaaaagataagctgccgctgaaggtacaggtcgtgatcaacagcctgacggattattttgttgaggtcggtaaattgtttcaggagatgcacgggcgcgggaaagagaagtaattcatattgtactgttacgttgtacaaacctgtgccaacgggttcccctcaccctaaccctcaccccaaaggggcgaggggaccgttcgtgcacgtagaaagattaattatccttctgaaaatagtgaaattattacgcagtaccgccaacagtcaggttatcgactttcaacgttggctggcccacgccaaccggcaaactttgcccttctttaccgcagacacccacgccgttatccagtttcaggtcgttgccaaccatgctaatctgctgcatggtttcgataccggaaccaatcaacgttgcgcctttcaccggcttcgttactttaccgttttcaatcagatatgcttcactagtggagaaaacgaatttgccggaggtgatatccacctgaccgccaccaaagttcggtgcatagataccgtactcaacggattcaataatttcctgcggggtgcttttacccggcagcatataggtgttggtcatacgcggcatgggcagatgggcgtaggattcacggcgaccgttgccagtcggcgtcatccccatcaaacgcgcgttgagtttatcctgcatgtagcctttcagaatgccgttctcaatcagcacgttgtactggcctggcgtaccttcgtcatcaatcgccacgctacctcggcgatcgaccatcgtgccatcatcaaccacggtacacagttcactagccaccagctccccgacctgtccactaaatacactagtgccacggcggttgaagtcgccttccagaccgtgaccaaccgcttcatgcaacagcacgcccggccaacctgcgccaagtactaccggcatggtgcccgctggtgcagcaacggcagaaagattgaccagcgccatacgcactgcttcttttgcccatgcatccgcacggacttcgccgtcgagatcggcaaggaagaattcataaccaaaacgaccgccgccgccactggcaccgcgttcgcgtttgccatcttcttcgacgagaacgctcacggaaagacgcaccagcggacggacatccgccgctagcgtgccgtcggtggccgcaaccaaaattaattcatagacaccactgaggctggcagtcacttcctgtacgcgcttgtccgcttcgcgggcaaccttatcgacgcgacgcaggatatccagcttctcttcacggctcatgctttgcagcggatctacgctggtatacaacgggctatgctctaccgcgcccagcgtctgtactttaccatcaccactatcacggacgatggtgcgcgccgcttgcgcactctgttccagcgccagcaggctgatttggtcagcgtaagcaaatccggttttttcaccgctgattgcacgcacaccaacgccctgatcgatgttgtaagaaccatctttaataatgcggtcttctaaaacccaggattcgtgatagctgctctgaaaatagagatcgccataatcaaggcgacgttcggccagttgaccgaggatcgcgaacaagtcctgatgtttcaggccgttcgccgctagcaattgttcacttaccaggttaagactcatcgtttttgctactcgttagttactgcagtagaggattttttacggctgccggatgcggcgtgaacgccctatccagcctacggttatgttccggtttgtaggcctgataagacgcacagcgtcgcatcaggcaacggctgtcggatgcggcgtaaacgccttatccgacctacggttatgttccgtttgtaggcctgataagacgcacagcgtcgcatcaggcaacggctgccggatgcggcgtaaacgccttatccgacctacggttatgttccgtttgtaggcctgataagacgcacagcgtcgcatcaggcaacggctgccggatgcggcgtgaacgccctatccgacctacggttatgttctggctcgttggcctttggcaacgattatcctatgagattggggcaattacgcgccctcgtcaaatcattgcgctttttctttacgcggttggcgcaacacttcgttgatttgcggatcgtccagcggaccgctaatgtgatagcgcaaaatggagactttgctccacagcggccccagcactttactggcggcaaacactgccgcgccaacaatggggttaaccgcaaaagccgcagccacgcccaccgtcgcagaaatctctggtgcgacaaccgcttccatattcaggtcgcgacgtaccagatttacgctccctttcatggcgatatccgcctccaggccatccaccagcgtgtcgtcggtgtgcataacgccgtctttaatccacgcggtgctgcgaatggagtcaaaatagaacccttcgccaaaagtgtctctgaaatcaaaacgcagcttacgcatcagggcatctacgctcaataagcgcagcaattgcccggcatgtccggtattgatttcggtaatttcgcctttacccagttgagtatgaatgatgccattcaacgtcgcttcatctggctgccagggtgctttgcgccagtgtaaatcgtaatccacattaaaactgctctggcgtatgggcgtcgtgacaccaaaaaattctgcggcggcatcaattttctgcccgcgcagttttcctttcaggctggtacgttcattccccggattattaacccattcaccatcggcagtaagccggctgaaaccagtatcaatcagtccattggtcagcgttaacgtatcgccagaaatggtgatatcactgtcaatgcgaccgaatttttgcccccagaaccagcactctgtgcatcgtatttgggcgtccggccagccacggaagttaatgcgctccgttgtcgggaaaggactactcggcgtactatcaccacgagttttcgccacgctcgggttgtaataaagatatttgatattcgccagccacggcgcgttattacgcatcgctagcgtggcgttgatttcacgcccttgcgcttcaaccagggtgccatttgccgtcggttggctaacaatactcaggttattccattgctgatttcccagactcaacataggcgtacgtaacgttatgtgttgtgggaaactcgctgcaccaccgacactctccgcagcgcctttctggaacagggccagccactcggcaccattcatcggcggcatattgagttcaacgccactttgttccggcaacggcgggagcgttttactgtctgccgcccaaatagcacgatcgagcgtcagcttttgaccgagcaaccagcggctattgaaatgattatccgcaccagcctgtccggttaattcaaagctgttgagattgccatcaaccttaacgtttaccgctagtggttcacccgcaggtttggctaacggactaggtaagtgactgctcacattctttagatcgccgttcagctctatgttataggtcgcaccagcatgataaggcagatcaatgcccactttaccatcccacgccacgctgccactcaatgcttcgttcaccgcttcaggcagaacgccggttttcgccggttgccagttaccgttgaggtttaccgctacctggtaggcttttgccccttctttggtggaaaaatccacgttcaacggctgattaaaccagcttgctgtcagtggttcactttgcagatcgctattgataaagctgaatttaccgctcaaatttttcagggtgctgtcgagtggtttgataaacagactgttattacgcagcgtcacttcacctttcgcggttaccagttcgccgttcagcgggatatcaagatgtaagcgagcattcacatcgccgtcgagctggagttcttgcagggtcgcacccagagaatctttcagcggtgtctcatcaaagtaagggccaacggctttacccggacctttaatgtcagcgtcaatcagcagtttttctttactgtagtcagggatcactgcggtaagattactcgcgcgcacgccgcccagattaacgccatcggttttcatccataaaccgtcgttaataaagtccagttcaatatcaaggttagttaatgcaggccagtccggctggaaggcaaacttcgcgttgcgcagcggcaccagcacttcaaactgaccttcgttgtgtttataggggaagagttgcggattgccaccataaaccagcgtcgcgttatccgcttcaccgccctgaatcgcgccacttaagtaatcaaccaggtctttacccatcaagttttccgggaaatagcgccaggcttgactaccatcatcggtactgatgccagccagaatacccagccagggttcatcgttagcaggttgcaggtaacgaaaaccgccgcgcgcatggacggctttggctttaacgtcaatattacgcccatccagctggaaacctttgttattgttcagccagcttatagttgcctggccgtcggcgatttctagtggcgcacggaataccgtttcgtaaggcatctttgcctgcttcatgctcgcggtaagcaaaccattttcaacgctgccggaaagcgtcccggagaagtgttccgcacccggtaataatttccattgcttccaggccagatcgctccagcttgcctgaaaacgggtcttgtctgccgcctgaagcgggatatccagcgccagagtgttaatcttgccgctcggttgtgtggagcgccaaacatcacccagtgcaggactaagtttcgcggccagcgggcgtatgccctccaggcctgccagctccagattactggcgcgaatccggagttcgtcactgcgtttattgtctttgccgccaacgtcctgttccggtatccaggccagcgtcaatgctccgctcggccagggtttgccgtccatcgtgatccgtgtatcgggaatagagaactgccagcccggattttcacgcgtaatatgcgcggtcagattatccacgctcagcgtatgcgtttgcttctcgcccaaccagctggcaccgccctgtttcagccagacgtcaccgccggttacatcgcctttgtcgatcgtcatccagccttcaagggagaactgtgccgtttccagcgcaatattgtcctgcatccatttaccgagccacggcttcaggtcgatgtcatccgcctggagccagacgcgaccattgcttaacaacccctcatcatcgcgcaaatccatgcgcacctgcatcacgccgtgctgtccggtaaggctggagaggcttaccaggccttccgcacggtgtcgacgtggatcgttcagccaggtgagttgtgggatcgccagctcggcgcgctgaccggatggcgtcaggaaactgacttcactgtcgcgaagatcgaaatggtcaaattgacgaagaaacagatcgctgatgtgactggcttccagactgtcatcactaccaccgctggtgataggagtgttggtgcgaaagcgcagctgccagaaagtgaggtcgcgaaactgccagcgcatatgtaacaggctctgccagacatccagcgccagagtaacgcgtttaacgctaaattcgccgccatcttttagttctgcacggatgtcgtgtgcttcaagcgtcgggccaaaattctgccagctggcactgagctgactggcttctaccggcatgccagtcgcggattctattttgttgaggatttccggacgccaggcgtcaagatgcggtaaagcaatacgcaggccgctaaccagcagggcagcgatcacaacgagcgcggctccagtaagcagtaaaatccccggcaatcgcctcacccgtcactccttgtctgctaaaaatgtgactcaaaaaccctttgccggatggcggcccagcatctgtttacatcattacgacgtcaaactgctcctggttatagagcggttcaatttgtactttaacctgtttgccaacgaaaatttccacttccgccaggctgtgactctcttcgcctttcaaggcttcagctactgccggagaagcatagaccaggaaacggtcggagtcgtaagcatggtggacacgaacaatctcgcgcatgatttcatagcataccgtttccacggttttcaccgttccgcgaccgtggcaggttgggcattcgttacacagtacgtgctcaatgctttcgcgggtgcgtttacgcgtcatctccaccagccccagcgcgctaaaaccattaacgctggttttcacccggtctttgctcaacgcctgctccaggctgtgcagcactcggcggcggtgatcttcattattcatatcgatgaaatcaataatgataatcccgcccagattacgcaaccgtaactggcgagcgatagcctgcgtcgcttcaatattggtattgaaaatggtgtcgtccagattgcgatgaccgacaaacgctccggtattgatgtccacggtggtcatcgcttcggtctggtcgataatgagataaccaccggatttcagttctactttgcgttccagcgctcgctggatttcgttttcgacatcaaagagatcgaaaatcggctggcgtcctgtgtaatgctccagcttgcttgtcatctcgggaatgtactcgctggtgaactcaagtaacgcttcgtaagtcaggcgactgtcaacgcgaatgcggtccagttcggcatcggcgaaatcacgcagaacacgctgcgccagcgccagttcgccgtacagctgataacgggtctgcgggcgttttttacgctccataactttggtccagacgcgtttcagataagcggcatcggaggccagttcagcctcgccaaccccttccgctgcggtacggatgataaacccgccctgctcgtcgcaatactctgcgaccacttttttcaggcgttcacgttcactttcgctttcaatacgttgggaaaccccaacgtgagaagcccctggcataaacaccagatagcgagaagggagcgtgatatcggtggtcaggcgcgcacctttagtgccaagcggatctttcaccacctgcaccatcagatcttgcccctgacgaaccagttcgctgatgtcgcgcaccgtgaattgcttttgttcttcacccgccacacattcggtgtgcggcatgatgtcggatgcatgaagaaacgcggctttatccagcccaatatctacaaaagccgcctgcatacccggaagtacacgacttacacgacccttgtagatattgcctactattccgcgtcgcgcctcacgttcaatatgaatttcctgcagaataccgccatcaatatacgccactcgcgtttcgctaggcgttacgtttactaacaattcagccgtcatgtttatcccttttctcacgcagtgcgttaaaattacttaataattcatacgtttcaaccagcggtaagccgactacggcgtgatagctgccatttatcttcctgacaaaacagccacccagcccctgaataccgtatgcacctgctttatctaacggttcatcgctggcgacatagcccgcgatgtcttcgtctgttaacgttctgaaagtcacatcggtgaccaccaggcaatcgagaatgtgctggctgtcggccaacgccactgctgtcatcacctgatgggtctgaccgcttaatttgcgcaacatctgcgccgcatgctctgcgtcgcgcggtttctccagcacttctccgttcaggataacgatagtatccgcacccagcaccgggagatccttcgccgtttgcgcgacacctgcccgtgctttctcgcgcgccagacgcacaacatactgctgcgcgctctcctgcggctgacgctgctcctcaatgcccgtaacaatacgttcaaaggtcacgccaagttgcgcaagtaactcctgacgacgcggagaaccggaagctaaatacagagaagtcatagaaacctttattgcactgcaaactgctgacggactttgcgcatcagcaagaaaatccacggccagagcaccccattgactacactactccagaacacttccggtctgaaagagacgttaatcactaaaaactctgcccagaaaacaataatatccaccaccaggctaagcaacatgacgaccagcgcctgctgccataatgcgaggttgcggaaaagctggtatttcagcgccaccaggtaagcaatgatgctcatcgccaatacgcgtacgccaagcgtgctgccgctgatcagatccagtatggcacccatcacaaaacctgtgcccacatttacgcgatgaggcaaggccaggatccaatacaacaagatgagtaacacccagtttggccggaaaacaatcaggttatccggccagggcatgatttgcagcaacagcgcaatgaggaaagagagccagattacccagcgtccctggctacgatagctcgccactattgccctcccggcgcacgttattgccctcccggcgcacgcgcaggcggttgagcaccactttgcggcggcgtagccctttgtggagagcgattagcagcaggctgtgtcggcgcagcaggcgcagtagctgcatttcctgtcgccggttgctgcggagtcggctgagcgatccccgttgccggttcaggtaactttggccccatcgcgtctgggctaggcaatacctgcggcatcatctgcatcagacgttcattagcaacacgatgcacctcttccggcgtcatcgggttagcgccgttacgatctgccccccacagcagcagcagataacgcaaacgttgcagccctgcagtcggacgcgcctgaatcacagtataagcgcgctgggtatcgagttttacggaagagacaaccgcgaccggatagccttccgggaaacgaccgcccagaccggaagtcaccagcacatcaccaacacgaatatccgtattcgccggcagatgctcaagctgcaaatcatccgtacaaccgttaccggctgcaattacgcggatatcgttgcgcagcacctggattggcagcgcgtgggtcgcatcacaaatcagcagcacgcgactggtcagtttagcgacggccaccacctgaccaacaacacctttgtcgctgatgaccggctggccttcataaacgccattaacgctacctttatcgataacaacttgatcgctataaggatcgttaaccgtggagataacctgagtcaccattttctgctcatcctgacgcagcggggaacccagcagctcgcgcagacgcgcgttctcctgtttgtattgtccaagcatcagcagttcactgtttttcagcaacagttcctgacgtaacgcccggttttcaagttctaattggtcacggctggccagcgtctggcttacgccatccagcaattcacgaggagcattggaaacaaagtagaaaggactgacggcggtatccatataagtacggatttgactgaacgtccccaggcggctgtcggcaataataatgccgagcgccaccagcaccgccagaataaggcgaatctgtaggctcgggccacggctaaaaattggcttcataagttatgcgtattctcgtatcagaccaggcagggtaaacagacacttcccctgcctgcatccgattactcttcgctgaacaggtcgccgccgtgcatgtcgatcatttccagcgctttgccgccaccgcgcgccacacaggtcagcgggtcttcagcaacaacgactggaatgccggtttcttccattaacaaacggtcaaggttacgcagcagtgcgccaccaccggtgagcaccatgccgcgctcggagatgtcggaagccagttccggcgggcactgttccagtgcaaccattaccgcgctcacaataccggtcagcggttcctgcagtgcttcgaggatttcattggagttcagggtaaaaccgcgtggaacaccttctgccaggttacggccacgaacttcgatttcacggacttcatcgcccggataagcgctaccgatttcgtgcttgatacgttctgcggtggcttcaccgatcagagaaccgtaattacgacgcacatagttgatgatagcttcgtcgaaacggtcaccaccaatgcgcacagaagaggagtaaaccacaccgttcaaggagataacagcaacttcagtggtaccaccaccgatatcaaccaccatagaaccggtcgcttcagaaaccggcaggccagcaccaattgcggcagccatcggttcttcaatcaggaagacttcacgggcaccagcgccctgcgcggattcacgaattgcgcggcgttcaacctgggtcgcgccaaccggcacacaaaccagaacgcgcgggcttggacgcataaagctgttgctgtgcacttgtttgatgaagtgctggagcattttttcagtcacgaagaagtcggcgataacgccgtctttcattgggcgaatggcagcaatattgcccggcgtacggcccagcatctgcttcgcgtcatgacctactgcagctacgcttttcggactaccggcacgatcctgacgaatggccaccacggaaggctcattcaatacgatgccttgtccttttacataaatgagggtattcgcagtacccaggtcaatggacaagtcattggaaaacatgccacgaaattttttcaacatactaagggataatcctgaaagctggggcggaaaagaaaatccgcttactttaccaaccacacgcagcagcgacaaggcgcaaaaatcatctgctacggtgaaaattagtgcagttcgtttcctttgttacaaatctctgcctgagtccagaaaggcttaatgcatcagcagcattcctcgcctgtttgcaaccgcgtaaggtcattcatctgcatatgtgctgcaacaatctggcgagcagacaagcacactcccatgagacgcagcgcgcattattctacgtgaaaacggattaaacggcaggttaaacgctgtatctttgactatattttttcacgttagtatcaagtggctgactggacgcgaaaaaatccccttgcccgcctgtaacaccgcgctgaatcagggtctgccactcgcttcggctacgcacgccggtggcgtaaacctgggtgctggtcccggagcaggcttccaccaggctttgaaccagcagctggttctccgttcgcttctcaatgtttctgaccagccccggatggagcttgagtaactcaacattaagttctttgatccaactggtacttaccagcgtcaaaccagcctggttgacggctacccgtacccctaaagcattcactaaacgaataacaggttgtaaacgactgatatgttgacctacatcggcctctgcaagttcaataattatgcgttttcgttgacttttttcacattgcattaacgtatcgcgcagccaacgctgaaaacgcgggcgaatcaggctctcaacggtaacctgaatcgccagattttcctctggccagtaacgcaatagtggaataagacggctgatttgcagacggtcatactcttcgcttaagccaaactgcaagaccatcggcatatgctccgcgctgctaacctcttcattaccatcgaagatgcggcacatgagttcgcgatgatgaacctgaccttcgcgagtaaccgccggtttttgataaaggcgcgggccgccgcgactgagcatttgctcgataagcgtacgccagcgaacattaccgcgtcctttttcaggcaagctgtcatcgtaaatagcccagctattgccgccctgcaatcccgcattacgcgtggcagactctgcatgttccattacctgctcggtatcctgaccactacgccaggcgcagataccaatgtggatcatatcgtcgcgatcgagcattttattgttcggcaaggtatcaacggctttgattaactgaccggcgatgctctctgcctcttttaacgtccggtgcggtaacagcgcagcaaaatcactgcggtggtaacgcgccagcagtgcgccagggtagcgcatcataaatgtgctcagcagattcgtcagagtgaagaactgttcttcaacctggctgtgcccccaggtatcgctcaacatattgaaatccggcagacgaatcatcatcacgatcccgtgggtacctactttctcctgatcttccagtaacgttgctaactgattatcgaaaaagagtcggttattgaggccggttttcacgtcctgggcggcataagagcggatcagcgtatcaagacggctgtgttgttcgcgtgcgttctgaatttcacgaagcagcgtatccagcgcactgctggttctgggcggccattcatagatggttcccaacacattagagccacgctcaccgtttaagatacgagtagcccgggtttccagcaattcttgcccggcaagttgccgttgtaaccagcgtaccgccaggaagagcataacaatgataaagccaatcgcccccgtgagcggcgcggtggtcatcaagctatggaaatagttgcccatcggatcctgataaaccagacgcaagctcatccccggatgctttatcaacggaacgctcagttcgcgaaacagatcgctggagccaactggacgataactaccatttctggccagggtataaacctgtttatcaccatggagcaggtctacacgaacgatatctgcgctcatcattaattcggtaatttgtggccttaatacgctgaagtcattgctcacaaggtgggtatcaatcgccgtcgccaccgcctgaacgcgatgactaaacttatactgaatggcgttgtagaaacttaggctacagcccagcaaagtcacaaaaattgttaacccggtgagcagcgtaacaaaggcgctaaatttcgtcgttaatctcatccttgtgttaactccgatagtgaggaagcgggcatactagcaaatcagatttatctcgcaatttattgcgcttcatcggctttgcttttccattagcgagtatagtcttcagaaattattttccaatccatcatgcacatgaggaccacttatgcaggcgttacttttagaacagcaggacggcaaaactctcgcaagtgtacagactctggacgaaagtcgcctgccggagggcgatgtcacggtcgatgttcactggagcagcctgaactataaagatgcgctggcgattaccggtaagggaaaaatcatccgtaattttccgatgattcctgggatcgattttgccggaactgtacgcaccagcgaagatccgcgttttcatgccggtcaggaggtgttactcactggctggggcgttggtgaaaaccactggggtgggctggcggagcaggcgcgagtgaaaggtgactggctggttgccatgccgcaagggctggacgcgcgtaaagcaatgattatcggtactgccggttttaccgccatgctgtgtgtgatggcgctggaagatgccggtgttcgcccgcaggacggggagattgtcgtgacgggtgccagtggtggcgtcggcagtaccgccgtggcgctgctgcataagttgggttatcaggtcgttgccgtttccggtcgcgaaagtacccatgaatatctgaaaagtttaggtgctagccgtgttctccctcgtgatgagtttgccgaatcccgtcctctggaaaaacaagtctgggctggggcaattgacaccgttggcgacaaagtgctggcaaaagtgctggcgcaaatgaattacggcggctgcgtggcggcctgtggtctggcgggtggttttactctgccaaccacggtcatgccatttattctgcgtaatgtccgtttgcaaggggtggatagtgtaatgacgccaccagaacgccgcgcacaagcctggcagcgactggtcgccgatttaccggaaagtttctatacccaggcggcaaaagagatatctctgagtgaggcaccgaactttgccgaggccatcattaataaccagatccagggtcgcacgctggtgaaggttaactaaccatttagcagggaataataagagagggaactcattttgaaatcattattcaatcggttaacgggaaaagcggttagccggacagctttcgtcgaacaccttggtcaggaagttatacaacatcatccaaactggaaagtcatgatttcgactgaccacaaattgatgcgcattgatactccactaaacagctattattgatacgcctccgtcgcctgttaggtttatgttgctttgcctgggcgacgctacgcttagccccttacttatttctggtaccatggggtgaataatctgattttgtttgactacaaattaatcactcgaacctatttaatgctgagcattgtcaatcggttaattttgcgtgctttagcattcacatctatccagacgatgcagtgaaaattgggtaatccccagcaaccgctgcgtaatgtcgtctatcttgtcgcgatcctggcatccctacattatttgtggtctgtgaagattatctcattgcagcccctcatcttcgcagggctggcttttcagcttttcaccttacgttataagaagttccgtcgatgatggcgctaatttcgtgaattgtgcggcttgttgcaaattacacggtgttgaaggttatttacatgttagctgttgattatcttccctgataagaccagtatttagctgccaattgctacgaaatcgttataatgtgcgacctcgtcctccctgacgcagtttttgcgctgcggaaaaggtgacattggcgcaacgaaggtatattttgttttttgccggaggatagcagcagatcgctgcacaatgtccgtcaagtctaacattgacactctggggcaaaatagaccggcgtcccggcctgctggaatttatcgctatgcatacagctgtcggggcatacgctttacagacggcggtgaaacgcctgtcacaatcacactaaacaaagagtacggaacccactcatggatattcgtaagattaaaaaactgatcgagctggttgaagaaagtggcatctccgaactggaaatttctgaaggcgaagagagtgtacgcattagccgtgcagctcctgccgcaagtttccctgtgatgcaacaagcttacgctgcaccaatgatgcagcagccagctcaatctaacgcagccgctccggcgaccgttccttccatggaagcgccagcagcagcggaaatcagtggtcacatcgtacgttccccgatggttggtactttctaccgcaccccaagcccggacgcaaaagcgttcatcgaagtgggtcagaaagtcaacgtgggcgataccctgtgcatcgttgaagccatgaaaatgatgaaccagatcgaagcggacaaatccggtaccgtgaaagcaattctggtcgaaagtggacaaccggtagaatttgacgagccgctggtcgtcatcgagtaacgaggcgaacatgctggataaaattgttattgccaaccgcggcgagattgcattgcgtattcttcgtgcctgtaaagaactgggcatcaagactgtcgctgtgcactccagcgcggatcgcgatctaaaacacgtattactggcagatgaaacggtctgtattggccctgctccgagtgtaaaaagttatctgaacatcccggcaatcatcagcgccgctgaaatcaccggcgcagtagcaatccatccgggttacggcttcctctccgagaacgccaactttgccgagcaggttgaacgctccggctttatcttcattggcccgaaagcagaaaccattcgcctgatgggcgacaaagtatccgcaatcgcggcgatgaaaaaagcgggcgtcccttgcgtaccgggttctgacggcccgctgggcgacgatatggataaaaaccgtgccattgctaaacgcattggttatccggtgattatcaaagcctccggcggcggcggcggtcgcggtatgcgcgtagtgcgcggcgacgctgaactggcacaatccatctccatgacccgtgcggaagcgaaagctgctttcagcaacgatatggtttacatggagaaatacctggaaaatcctcgccacgtcgagattcaggtactggctgacggtcagggcaacgctatctatctggcggaacgtgactgctccatgcaacgccgccaccagaaagtggtcgaagaagcgccagcaccgggcattaccccggaactgcgtcgctacatcggcgaacgttgcgctaaagcgtgtgttgatatcggctatcgcggtgcaggtactttcgagttcctgttcgaaaacggcgagttctatttcatcgaaatgaacacccgtattcaggtagaacacccggttacagaaatgatcaccggcgttgacctgatcaaagaacagctgcgtatcgctgccggtcaaccgctgagcatcaagcaagaagaagttcacgttcgcggccatgcggtggaatgtcgtatcaacgccgaagatccgaacaccttcctgccaagtccgggcaaaatcacccgtttccacgcacctggcggttttggcgtacgttgggagtctcatatctacgcgggctacaccgtaccgccgtactatgacagtatgatcggtaagctgatttgctacggtgaaaaccgtgacgtggcgattgcccgcatgaagaatgcgctgcaggagctgatcatcgacggtatcaaaaccaacgttgatctgcagatccgcatcatgaatgacgagaacttccagcatggtggcactaacatccactatctggagaaaaaactcggtcttcaggaaaaataagactgctaaagcgtcaaaaggccggattttccggccttttttattactggggatcgacaacccccataaggtacaatccccgctttcttcacccatcagggacaaaaaatggacactcgttttgttcaggcccataaagaggcgcgctgggcgctggggctgacccttttgtatctggcagtttggttagtagccgcttacttatctggcgttgcccccggttttaccggctttccgcgctggtttgagatggcctgcatcctgacgccgctgctgtttattggactgtgctgggcgatggtgaaatttatctatcgcgatatcccactggaggatgacgatgcagcttgaagtaattctaccgctggtcgcctatctggtggtggtgttcggtatcagcgtttatgcgatgcgtaaacggagcaccggcaccttccttaatgagtatttcctcggcagccgctctatgggcggtattgtgctggcgatgacgctcaccgcgacctatatcagtgccagtagctttatcggcgggccaggagctgcttataaatacgggctgggctgggtattgctggcgatgattcagcttcctgcagtctggcttagtctcggtattctcggcaagaagtttgcgattcttgcgcgccgctacaatgcagtgacgctgaacgatatgctgtttgcccgctaccagagtcgtcttctggtgtggctggcgagtttgagtttgctggttgcgttcgttggtgcgatgaccgtgcagtttatcggcggtgcgcgcctgctggaaaccgcggcgggtattccttatgaaaccgggctgctgatttttggtatcagcattgcgttatataccgcctttggtggctttcgcgccagcgtgctgaacgacaccatgcaagggcttgtgatgctgattggcaccgttgtgctgcttattggcgtagtacatgccgctggcggcttaagtaacgcagtacagaccttgcaaaccatcgatccgcaactggttacgccacaaggcgctgacgatattctgagccctgcctttatgacgagcttctgggtactggtgtgttttggcgtgattggcctgccgcatactgcggtgcgctgtatctcttataaagacagcaaagccgtacatcgggggatcatcatcggtacgattgtggtcgcaattctgatgttcggtatgcacctggccggagcgttaggtcgggcggtgatccccgatctcaccgtaccggacctggtgatcccaacgttaatggtaaaagtgctgccaccgtttgctgccgggatcttcctggctgcaccgatggctgcgatcatgagcacaattaacgcccaactgctgcaaagttccgctacgatcattaaagatctctatctgaatatccgtccggatcaaatgcaaaacgagacgcgtctgaagcggatgagcgcggtaattacgttagttctcggcgcgttgctgctgcttgccgcctggaagccgccagaaatgatcatctggctgaatttgttggccttcggtgggctggaagccgttttcctgtggccgctggtgctgggtctttactgggaacgcgccaacgccaaaggcgcgctaagtgcgatgatcgttggcggcgtgctgtatgccgtactcgcgacgctgaatattcagtacctgggcttccaccctatcgtgcccagcttactactaagtttgctggctttcctggtcggaaaccgtttcggtacatccgtcccgcaagctaccgttttgactactgataaataaagagttttgccatgccttggatccaactgaaactgaacaccaccggcgcgaacgcggaagatcttagcgatgcgctgatggaagcgggtgccgtttctatcacttttcaggatacccacgatacgccagtatttgaaccgctgccgggcgaaacgcgcctgtggggcgacaccgatgtgattggtctgttcgacgctgaaaccgatatgaacgacgtggtggcgattctggaaaaccatccgctgctcggcgcaggcttcgcgcataaaatcgaacaactagaagataaagactgggagcgcgaatggatggataatttccacccgatgcgctttggtgaacgactgtggatctgccctagctggcgtgatgtgccggacgaaaacgccgtcaacgtgatgttagatccagggctggcgtttggtacgggtacccatccaaccacctctctgtgcctgcaatggctcgacagcctcgatttaaccggtaaaacagtcatcgactttggctgtggttccggcattctggcgatcgcggcgctgaaactgggtgcagcaaaagccattggtattgatatcgatccgcaggcgattcaggccagccgcgataacgccgaacgtaatggcgtttctgaccgtctggaactctacttaccgaaagatcagccagaagaaatgaaagccgacgtggtggtcgctaacatccttgcaggcccattacgtgaactggcaccgttaatcagcgtcctgccggttagtggcggtttgctgggcctttccggtattctggcaagccaggcagagagcgtttgtgaagcttatgccgatagcttcgcactggacccggtcgtggaaaaagaagagtggtgccgtattaccggtcgtaagaattaaccttcgcatcgccgtagggtgacgcggggcgaagtgcgagcaagctcacaaaaggcacgtaaatttgccgattatttacgcaaatttgcgtgccaaaattttcattcataaagaaaaattgagaacttactcaaatttctttgagtgtaaattttagtcactattttctaatatgatgatttttatgagtaattatcgcaccacgctcattttaaatgcaattctttgatccatctcagaggattggtcaaagtttggcctttcatctcgtgcaaaaaatgcgtaatatacgccgccttgcagtcacagtatggtcatttcttaactcatgcgcatcggacaatatcagctcagaaatcgcctgatcgcagcgcccatggctggcattacagacagaccttttcggacgttgtgctacgagatgggagccggattgacagtatccgagatgatgtcttctaacccacaggtttgggaaagcgacaaatctcgtttacggatggtgcacattgatgaacccggtattcgcaccgtgcaaattgctggtagcgatccgaaagaaatggcagatgcagcacgtattaacgtggaaagcggtgcccagattattgatatcaatatgggttgcccggctaaaaaagtgaatcgcaagctcgcaggtagtgccctcttgcagtacccggatgtcgttaaaagcatccttaccgaggtcgtcaatgcagtggacgttcctgttaccctgaagattcgcaccggctgggcaccggaacaccgtaactgcgaagagattgcccaactggctgaagactgtggcattcaggctctgaccattcatggccgtacacgcgcctgtttgttcaatggagaagctgagtacgacagtattcgggcagttaagcagaaagtttccattccggttatcgcgaatggcgacattactgacccgcttaaagccagagctgtgctcgactatacaggggcggatgccctgatgataggccgcgcagctcagggaagaccctggatctttcgggaaatccagcattatctggacactggggagttgctgcccccgctgcctttggcagaggttaagcgcttgctttgcgcgcacgttcgggaactgcatgacttttatggtccggcaaaagggtaccgaattgcacgtaaacacgtttcctggtatctccaggaacacgctccaaatgaccagtttcggcgcacattcaacgccattgaggatgccagcgaacagctggaggcgttggaggcatacttcgaaaattttgcgtaaacagaaataaagagctgacagaactatgttcgaacaacgcgtaaattctgacgtactgaccgtttctaccgttaactctcaggatcaggtaacccaaaaacccctgcgtgacagcgttaaacaggcactgaagaactattttgctcaactgaatggtcaggatgtgaatgacctctatgagctggtactggctgaagtagaacagcccctgttggacatggtgatgcaatacacccgtggtaaccagacccgtgctgcgctgatgatgggcatcaaccgtggtacgctgcgtaaaaaattgaaaaaatacggcatgaactaattcaggttagctaaatgcttgattaaaaaggcgctactcggcatggggaagcgccttttttataggtgtcacaaagggagtgaccatgagaacaggatgtgaaccgacccggtttggtaatgaagctaagaccattattcacggtgatgcgcttgccgaacttaaaaagatccccgccgaaagtgtcgatctgatctttgccgacccaccatataacatcggtaaaaattttgatggtctgatcgaagcctggaaagaagatctgtttatcgactggctgtttgaagtgattgcagagtgccaccgcgttctgaaaaagcagggcagcatgtacatcatgaacagtacggaaaacatgccctttatcgatctccagtgccgcaagctttttaccatcaaaagtcgcatcgtctggagttatgacagttctggagtgcaggcgaaaaaacactacggctccatgtacgaacccatcctgatgatggtgaaagacgcaaagaactacacattcaacggtgatgctattctggtagaagccaaaaccggaagccagcgcgcgttgatcgattatcgcaaaaatcctccacagccttacaatcatcaaaaagtaccgggtaacgtttgggattttccgcgcgtgcgttatttgatggatgaatatgaaaaccacccgacgcaaaaaccggaagccttactgaaacgcattattctcgcctcttccaacccaggcgatatcgttctcgacccgtttgctggtagctttactaccggtgccgtagccatcgccagcggacgaaaattcattggtattgagatcaacagcgagtacatcaaaatggggcttcgacggctggatgtcgcgagccattactctgcggaagaactggcgaaagtgaaaaaaagaaagaccggcaacctgagtaaacgaagccggttaagcgaagttgaccccgatctcattacaaagtaaaggatgtgtaagcctggttttcagattattcatttcgtgtatatttcctgccagacttggttaaacatgcacaggctcaggtaatgattcgcaagtattggtggctcgtcgttttcgctgtcttcgtttttctgtttgatactttactgatgcagtggattgaactgctggcaacagaaacagacaaatgccgcaatatgaacagtgttaatccactaaaactggttaactgtgacgaactgaattttcaggacagaatgtgaatttacatgacacttaattcattcgtttgatgaattaatttcgttatgttttcatctggcatgaacattcttaatacgttatcgaccagagcgggggcttgtttataaagatcataacccgccatattcattaaccagttttgaacaattccgctgaaggcaccatcaataataatcatcacaacatctaaatcgaggttatttgctacacaaccttgttgctgacacgcctgcaatacttcgcggagagtctgcggattaaagcccatcttttcgcgtatcactccctcggccagcatctcatcattaaattcacatttgtgatataagattttcagcaacgcctgctggcggggaattttggcaatatattgcaagccgacaatcaatttttcacgcaattgttgaaacgggtcatgctctaatccagccgtcaagtgttcctggattaactcccgcaaactaggctgttgcaaccacatctcattaaacagttgagtcttgttttcgaagtgccagtagatagcgccacgcgtaacgttagcggcgtcggcaatgtcgttgagcgtcgtcttgcttacgccatgctgcgcaaactgggcgatggcagtttcaatcagttcttgccgggtcttcagagcttcggctttggttctttttgccatgattaattattcaggaaataaatatattcgacacagagtgagaaaatagcgaaggttaatctatcacctaatgtgtatttatacgagaggctaatattgagttgctataaatcgttaaataaataatatatattatttacctaagatacattcactacatcaatatatatttcaatttacgaggttttaattctgcctctttcaacccgcgtcaaaataaaacagtagaatattaatctttttttgtgtttatgtgccttgagatgcctgtattcataactattccttacatcgacgaatgataatttgtaggatagcgaactgtatttttctttctgcgagttaacgcgttgcctttttgggtaaataacgcgcttttggttttttgaggaatagtaatgacgaaacatgccaggtttttcctcctgccctcctttattctgatctccgcggctttaatcgccggttgtaacgataagggagaagagaaagctcacgtcggtgaaccgcaggttaccgttcatattgtaaaaacggccccgttagaagttaagactgaattaccaggccgcaccaatgcttatcgtatagccgaagttcgcccacaggttagcgggatcgtactgaatcgcaatttcactgaaggcagcgatgtgcaagcaggccagtccctgtaccagatcgatcccgcgacctatcaggcaaattatgacagcgcgaaaggcgaactggcgaaaagtgaagccgccgccgccatcgcgcatttgacggtaaaacgttacgttccgctcgtgggtacgaaatacatcagccagcaggagtacgaccaggccattgctgatgctcgtcaggccgatgccgccgtgattgccgcaaaagccacagtcgaaagcgctcgcatcaatcttgcttataccaaagtcactgcgccaattagcggacgtatcggcaaaagcactgtgaccgaaggcgctcttgtcactaatgggcaaacgactgaactggcgactgtccagcagctcgatcctatctacgttgatgtgacccaatccagcaacgattttatgaggctgaagcaatccgtagagcaaggaaatttgcataaggaaaacgccaccagcaacgtagagttggtcatggaaaacggtcaaacctatcccctgaaaggtacgctgcaattctccgatgtgaccgttgatgaaagcaccggctccataaccctacgtgctgtcttccctaacccgcaacatacgcttttgccgggtatgtttgtgcgtgcacggattgatgaaggcgtccaacctgacgccattcttatcccgcaacaaggcgttagccgcacaccgcgtggtgatgcaaccgtgctgattgttaacgataaaagtcaggttgaagcgcgccctgtcgttgccagtcaggcgattggcgataaatggttgattagtgaaggactgaaatctggcgatcaagtcattgtcagcggcctgcaaaaagcgcgtccgggagagcaggttaaagccactaccgatacccccgcagatactgcaagcaagtaaggtaatctgacatggcaaacttttttattcgacgaccgatatttgcatgggtgctggccattattctgatgatggcgggcgcactggcgatcctacaattgcccgtcgctcagtatccaacaattgcaccgcctgcggtttctgttagtgcaaactatccgggcgctgatgcgcagaccgtgcaggatacggtgacgcaggttatcgaacagaatatgaacggtatcgataacctgatgtatatgtcctccaccagcgattccgccggtagcgtgacaattacccttaccttccagtccgggaccgatcctgatatcgcgcaagtgcaggtgcagaacaaactccagctcgccacgccgttgctgccgcaggaggttcagcagcaggggatcagtgttgaaaagtccagtagcagctatttgatggtggcgggctttgtctctgataacccaggcaccacacaggacgatatcagcgactatgtggcctctaacgttaaagatacgcttagccgtctgaatggcgtcggtgacgtacagcttttcggcgcacagtatgcgatgcgtatctggctggatgccgatctgctaaacaaatataaactgacaccggttgatgtgattaaccagttgaaggtacagaacgatcagatcgctgccgaacagttgggcggaacgccagcgttaccagggcaacaattgaacgccagcattattgctcagacgcggtttaaaaatccggaagaattcggcaaagtgaccctgcgcgtaaacagtgacggcagcgtggtacgcctgaaagatgtcgcacgggttgaacttggcggtgaaaactataacgttatcgctcgtatcaacggaaaaccggcggcgggcctggggattaagctggcaaccggcgcgaatgctctcgataccgcgaaagccattaaggcaaaactggcggaattacagccattcttcccgcagggaatgaaggttctctacccttatgacaccacgccattcgtccagctttctattcacgaagtggtaaaaacgctgttcgaagccattatgctggtgttcctggtgatgtatctgttcttgcagaatatgcgagcaacgctgatccccgccattgcggtacccgtggtgttgttagggacgtttgccatcctcgccgcttttggttactccatcaacacactaacgatgttcgggatggtgcttgccatcgggctgctcgtcgatgatgcgatagtggtggtggagaacgtcgagcgcgtgatgatggaggataagctcccgccaaaagaagcgacggaaaaaagcatgagccaaattcagggcgcactggtgggtatcgcgatggtgctgagtgcggtatttattccgatggcattcttcggcggttctactggggcaatttatcgccagttctctatcaccatcgttagcgcaatggcgctttctgttctggtggcattgattcttacccctgcgttatgtgcaacgctgcttaaacccgtctctgctgagcatcacgaaaataagggcggtttcttcggttggtttaataccaccttcgatcatagcgttaaccactacaccaacagcgtcggcaaaatcctcggatccacaggacgatatttactgatctatgcgctgattgttgcaggaatggtggtgttgtttttacgtcttccgtcttccttcttacctgaagaggatcagggtgtctttctgaccatgattcagttacccgctggcgcgacgcaagagcggacgcaaaaagtgttggatcaagttacggattactatctgaagaacgagaaagcgaacgttgaaagtgtctttacggttaacggctttagcttcagcggccaggcacaaaacgccggtatggccttcgtcagtctgaaaccgtgggaagagcgtaatggtgacgaaaacagtgcggaagcggtaatccatcgtgccaaaatggaattgggcaagatccgcgacggttttgtcattccattcaatatgccagccattgttgaactgggcacggcaacgggtttcgactttgagttaattgatcaggctgggctgggtcacgatgccctaacccaggcccgtaaccagttgcttggtatggcggcgcaacatcctgccagcttagtcagcgtgcgccctaatggcctggaagacaccgcgcagtttaaactggaagttgaccaggaaaaggcgcaggcattaggtgttagtctttctgacatcaatcagaccattagtacggcgctgggtgggacttacgttaacgacttcatcgaccgtggccgcgtgaaaaagttgtatgttcaggcggatgccaaattccgtatgctgccagaagatgtcgataaactttatgtccgcagcgccaacggcgaaatggtgccattcagcgcctttaccactagtcattgggtgtatggctctccgcgactggaacgctacaacggtctgccgagtatggagattcagggggaagccgcgccaggaaccagttccggcgatgccatggcgttgatggaaaaccttgcgagtaaattacctgcgggcattggttatgactggacgggtatgagctatcaggaacgcttaagcggaaaccaggctcccgctctggtagcaatttcctttgtggttgttttcctgtgccttgctgcactctatgaaagctggagtattcctgtcagcgttatgttggtagtgccgttagggattgtcggcgtgctgctggcggcgacactctttaatcaaaaaaatgacgtctactttatggtgggcttgctaacgacaattggcttgagcgccaaaaacgctattttgatcgttgagttcgctaaagatctcatggagaaagagggtaaaggtgttgttgaagcgacactgatggcagtacgtatgcgtctgcgtcctatcctgatgacctctctcgcctttattctcggcgtattaccgctagctatcagtaacggtgccggcagtggcgcgcagaacgctgtgggtatcggggtaatgggaggaatggtctctgcaacgttgctggcaatcttcttcgtaccggtgttctttgtggtgatccgccgttgctttaaaggataaatcagaaacataaaggcgctttcgggtgcctttattatttccagtgaaacccataaaaattaataagatattcttctgctcactctttaaaagctttctatagttcccgctcccttcactatttttacaattcacataatttgtcattattcattccgcaagatttataacctccggtgataaaatggcattcagctcgttaataagagagttaacttattaagcgttagcgtttattactgaggtaacaccatgaaaagattaattcctgtggcattgctcaccgcattgctggcgggctgtgctcacgatagcccctgcgttccggtttatgacgatcagggtcgtctggttcacaccaatacctgtatgaaaggcacgactcaggataactgggaaacggctggggctattgccggcggggcagctgctgttgctggcctgacgatggggatcatcgctctaagcaaataactgaacagggcgcggagttccgcgctctttttaacgatacagtatctctccataagataaaatattgctatattctgctgggtaattccctgctgatttagcatgttacatcgcgttatttcgctgctttcgaaataacgcatcaatttaattttcacacttcccaccagaaatatactcacgctaacaatcattattctgcttagtaaaacacgcgtaaatattttgcgccaaaatgtggcgcatgtttcattttcgcaccattgcggggcgctgtttttattatttcctgtctacactcagcttattgcgacgcgaaatcgtgcgcaaaagctggcactacttttgcttataagaggatggccacagacaggtaaaagacgtttcccaaacgtcctataacgataattttcgcctcacaggaagcattatgaaaaagatgatgatagccacactggctgccgccagcgtgctgcttgccgttgcaaatcaggcgctgctggcgcgacgcttgatgccgttcagaaaaaaggttttgtgcaatgcgggatcagtgatggattacctgggttctcttatgccgatgctgacggtaagtttagtggtattgatgttgatatttgtcgtggtgttgccgctgctgtatttggtgacgacacgaaagtgaaatataccccgctcactgcaaaagaacgcttcaccgctttacagagtggggaggtggatttgctctcccgtaatacgacctggactagttctcgcgatgccgggatgggaatggcatttaccggcgtcacttattacgacggcattggcttcctgacgcacgataaagcggggctaaaaagcgcgaaagaactggatggcgctaccgtctgtattcaggcgggtactgataccgaactcaacgtcgccgactacttcaaggcaaacaatatgaagtacacaccggtgactttcgatcgctctgacgaaagtgcgaaggcactggaatctggtcgctgcgatacgctggccagcgatcaaagtcaactgtatgccctgcgcatcaaattaagcaacccagctgaatggattgtcttaccggaagttatcagtaaagaaccgcttggtccggtagttcgtcgtggcgatgatgaatggttcagcattgtacgctggacgcttttcgccatgctgaatgctgaagagatgggcatcaattcccagaacgtcgatgaaaaagcggctaatccagcaacgcctgatatggcacatctgctgggtaaagaaggcgattacggcaaggatctgaagctggataataaatgggcctataacatcatcaaacaggtgggtaactacagcgaaatttttgagcgtaacgtaggtagtgaaagcccgctgaaaattaaacgtgggcaaaataatctctggaataacggcggtattcagtacgcaccgcccgtgcgttaagtcggtgtgaggtaacgagcgtcgctacggcggcgctctcttcagcgttatgctttccgaggtttctatgtctcatcgccgcagtaccgttaaaggcagtctctcttttgccaaccctacggttcgcgcctggttattccagatccttgccgttgttgctgttgtcggcattgttggttggttatttcacaacactgtaacgaatctcaataatcgtggcattactagtggttttgcctttctggatcgcggcgctggcttcggtattgtccagcatttgatcgattaccagcagggcgacacctacggacgcgtttttattgtcggcttactcaatacgctactggtttctgcattgtgtattgtgttcgcttctgttttgggcttctttatcggtctggcgagacttagcgataactggctgctacgaaagctttccacaatttatattgagatcttccgtaatattcccccgctgctgcaaatcttcttctggtactttgccgtgttgcgcaatttgcccggaccacgccaggctgtgagcgcgtttgatctggcctttttgagcaatcgtgggctttatattccgagtccgcagctgggagacggatttattgcgtttatcctggctgttgttatggctatagtcctttctgttgggctattccgctttaataaaacataccagataaagaccggacaactgcgccgcacctggccgatcgccgcagtgttgatcattggtttgcctttactggcgcaatggctttttggcgcagcactacactgggatgtcccagccctacgaggctttaacttccgcggcgggatggttttaattcctgaactggcagccttaacgctggcacttagcgtttatacatctgcatttatcgccgagattatccgcgctgggatccaggcagtgccttatggtcaacatgaagcggctcggagtctgggattacccaacccggttacgctacgccaggtcattattccccaggcattgcgggtgattattccaccgttaaccagccagtatctcaacatcgtcaaaaactcctctcttgccgccgctattggctatcccgatatggttagcctgtttgccggcaccgtgctgaatcagacggggcaagccatcgagacgatagccatgaccatgagcgtctatctgattatcagcctgactatcagcctgctgatgaatatctataaccgccgcatcgcgatcgttgaacgctaaggagtcatgatgacaaaagtattgctgtctcatcccccgcgcccggcgagccataacagtagccgcgcgatggtgtgggtgcgaaaaaatctgttctccagctggagcaatagcctgctgactattggctgcatatggttgatgtgggaactgatcccaccgttgctgaactgggcatttttgcaggctaactgggttggcagtacgcgtgccgactgcacaaaagccggtgcctgttgggtcttcatccacgaacgatttggtcagtttatgtatgggctttacccacacgaccaacgctggcgaattaacctcgcattactgattgggcttgtgagcatcgcaccaatgttctggaaaatactcccgcatcgcggtcgctatattgcggcctgggcggtgatttacccactgattgtctggtggctgatgtatggcggtttttttgctcttgagcgggttgaaacccggcaatggggcgggctgacgctaactttaattattgcaagtgttgggattgcgggggcgctaccgtgggggatcttactggcgttaggtcgccgctcccatatgccgattgtgcgtatcttaagcgtcatttttatcgaattctggcgcggcgtgccgctgattaccgttctgtttatgtctagcgtcatgctgccgttgtttatggcagaaggcaccagtatcgacaaattgatccgcgcgctggttggcgtgatcctgtttcagagtgcatatgttgcggaagtcgtgcgaggtggattacaggcgctgcctaaagggcaatatgaagcggcagagagcctggcgttgggttactggaaaactcaggggctggttattctgccacaggcgttgaagctggtaattcctgggctggtaaataccatcatcgcactcttcaaagataccagcctggtgatcattatcgggttgttcgatcttttcagtagcgttcagcaggcaaccgttgatcccgcctggttgggtatgagcacggaagggtatgttttcgccgcgctgatctactggatcttctgtttcagcatgagccgctatagccagtatctggaaaaacgttttaacaccgggcgtacaccgcattgaggacactatgagccaaattttactgcaacctgctaacgcgatgattacgctggaaaacgtcaataaatggtatggacaattccatgttttgaaaaatataaatttaaccgtgcaaccgggagaacggatcgttctgtgtggccctagtggttccggtaaaagcacaaccattcgttgtattaatcatctggaagaacatcaacagggacggatcgtggtagatggcatcgaacttaatgaagatatccgcaatattgagcgcgtcaggcaggaagtgggaatggtctttcagcatttcaatctcttccctcatctgaccgttttacagaactgtaccctggcaccgatttgggtacgcaagatgcctaagaaagaggctgaagatctggcggtgcattacctagagcgggtgagaattgccgaacatgcgcataagtttcccggacagattagtggtggtcagcagcaacgcgttgccattgcgcgtagcctgtgtatgaagccgaaaattatgttgtttgatgagccaacgagcgcgctcgatcctgagatggtgaaagaggtgctggatacgatgattgggctggcgcagagcggtatgacaatgttgtgtgtaacacatgagatggggtttgcacgaaccgtcgctgaccgggtaatttttatggatcgtggggaaatagtggagcaagctgcacctgatgaattttttgcgcatcctaaaagtgagcgtacgagggcatttttaagccaggtaatccattaattgaatgttagttcgaaaagcaaaaaggccatcctttcggatggcctttcgcttgatttgatgtctggcagtttatggcgggcgtcctgcccgccaccctccgggccgttgcttcgcaacgttcaaatccgctcccggcggatttgtcctactcgggagagtgttcaccgacaaacaacagataaaacaaaaggcccagtcttccgactgagccttttgttttatttgatgtctggcagttccctactctcgcatggggagaccccacactaccatcggcgctacggcgtttcacttctgagttcggcatggggtcaggtgggaccaccgcgctactgccgccagacaaattcttttctaatctgccgaactttaacctaaaaagtggtgctgatacccagagtcgaactggggacctcacccttaccaagggtgcgctctaccaactgagccatatcagcacgctaaatttgatgcctggcagttccctactctcgcatggggagaccccacactaccatcggcgctacggcgtttcacttctgagttcggcatggggtcaggtgggaccaccgcgctacggccgccaggcaaattctgttttatcagaccgcttctgcgttctgatttaatctgtatcaggctgaaaatcttctctcatccgccaaaacagcttcggcgttgtaaggttaagcctcacggttcattagtaccggttagctcaacgcatcgctgcgcttacacacccggcctatcaacgtcgtcgtcttcaacgttccttcaggacccttaaagggtcagggagaactcatctcggggcaagtttcgtgcttagatgctttcagcacttatctcttccgcatttagctaccgggcagtgccattggcatgacaacccgaacaccagtgatgcgtccactccggtcctctcgtactaggagcagcccccctcagttctccagcgcccacggcagatagggaccgaactgtctcacgacgttctaaacccagctcgcgtaccactttaaatggcgaacagccatacccttgggacctacttcagccccaggatgtgatgagccgacatcgaggtgccaaacaccgccgtcgatatgaactcttgggcggtatcagcctgttatccccggagtaccttttatccgttgagcgatggcccttccattcagaaccaccggatcactatgacctgctttcgcacctgctcgcgccgtcacgctcgcagtcaagctggcttatgccattgcactaacctcctgatgtccgaccaggattagccaaccttcgtgctcctccgttactctttaggaggagaccgccccagtcaaactacccaccagacactgtccgcaacccggattacgggtcaacgttagaacatcaaacattaaagggtggtatttcaaggtcggctccatgcagactggcgtccacacttcaaagcctcccacctatcctacacatcaaggctcaatgttcagtgtcaagctatagtaaaggttcacggggtctttccgtcttgccgcgggtacactgcatcttcacagcgagttcaatttcactgagtctcgggtggagacagcctggccatcattacgccattcgtgcaggtcggaacttacccgacaaggaatttcgctaccttaggaccgttatagttacggccgccgtttaccggggcttcgatcaagagcttcgcttgcgctaaccccatcaattaaccttccggcaccgggcaggcgtcacaccgtatacgtccactttcgtgtttgcacagtgctgtgtttttaataaacagttgcagccagctggtatcttcgactgatttcagctccacgagcaagtcgcttcacctacatatcagcgtgccttctcccgaagttacggcaccattttgcctagttccttcacccgagttctctcaagcgccttggtattctctacctgaccacctgtgtcggtttggggtacgatttgatgttacctgatgcttagaggcttttcctggaagcagggcatttgttgcttcagcaccgtagtgcctcgtcatcacgcctcagccttgattttccggatttgcctggaaaaccagcctacacgcttaaaccgggacaaccgtcgcccggccaacatagccttctccgtccccccttcgcagtaacaccaagtacaggaatattaacctgtttcccatcgactacgcctttcggcctcgccttaggggtcgactcaccctgccccgattaacgttggacaggaacccttggtcttccggcgagcgggcttttcacccgctttatcgttacttatgtcagcattcgcacttctgatacctccagcatgcctcacagcacaccttcgcaggcttacagaacgctcccctacccaacaacgcataagcgtcgctgccgcagcttcggtgcatggtttagccccgttacatcttccgcgcaggccgactcgaccagtgagctattacgctttctttaaatgatggctgcttctaagccaacatcctggctgtctgggccttcccacatcgtttcccacttaaccatgactttgggaccttagctggcggtctgggttgtttccctcttcacgacggacgttagcacccgccgtgtgtctcccgtgataacattctccggtattcgcagtttgcatcgggttggtaagtcgggatgacccccttgccgaaacagtgctctacccccggagatgaattcacgaggcgctacctaaatagctttcggggagaaccagctatctcccggtttgattggcctttcacccccagccacaagtcatccgctaatttttcaacattagtcggttcggtcctccagttagtgttacccaaccttcaacctgcccatggctagatcaccgggtttcgggtctataccctgcaacttaacgcccagttaagactcggtttcccttcggctcccctattcggttaaccttgctacagaatataagtcgctgacccattatacaaaaggtacgcagtcacacgcctaagcgtgctcccactgcttgtacgtacacggtttcaggttctttttcactcccctcgccggggttcttttcgcctttccctcacggtactggttcactatcggtcagtcaggagtatttagccttggaggatggtccccccatattcagacaggataccacgtgtcccgccctactcatcgagctcacagcatgtgcatttttgtgtacggggctgtcaccctgtatcgcgcgcctttccagacgcttccactaacacacacactgattcaggctctgggctgctccccgttcgctcgccgctactgggggaatctcggttgatttcttttcctcggggtacttagatgtttcagttcccccggttcgcctcattaacctatggattcagttaatgatagtgtgtcgaaacacactgggtttccccattcggaaatcgccggttataacggttcatatcaccttaccgacgcttatcgcagattagcacgtccttcatcgcctctgactgccagggcatccaccgtgtacgcttagtcgcttaacctcacaacccgaagatgtttcacttcagagttgcgaaaatttgagagactcacgaacaactttcgttgttcagtgtttcaattttcagcttgatccagatttttaaagagcaaaacttcgcagtgaacctttgcaggtacactctgaagtattttttatttaatcactacagagatggtggagctatgcgggatcgaaccgcagacctcctgcgtgcaaagcaggcgctctcccagctgagctatagccccataacatgtagttaaaacctcttcaaatttgccgtgcaaatttggtaggcctgagtggacttgaaccaccgacctcacccttatcaggggtgcgctctaaccacctgagctacaagcctgtagaggttttactgctcattttcatcagacaatctgtgtgagcactgcaaagtacgcttctttaaggtaaggaggtgatccaaccgcaggttcccctacggttaccttgttacgacttcaccccagtcatgaatcacaaagtggtaagcgccctcccgaaggttaagctacctacttcttttgcaacccactcccatggtgtgacgggcggtgtgtacaaggcccgggaacgtattcaccgtggcattctgatccacgattactagcgattccgacttcatggagtcgagttgcagactccaatccggactacgacgcactttatgaggtccgcttgctctcgcgaggtcgcttctctttgtatgcgccattgtagcacgtgtgtagccctggtcgtaagggccatgatgacttgacgtcatccccaccttcctccagtttatcactggcagtctcctttgagttcccggccggaccgctggcaacaaaggataagggttgcgctcgttgcgggacttaacccaacatttcacaacacgagctgacgacagccatgcagcacctgtctcacggttcccgaaggcacattctcatctctgaaaacttccgtggatgtcaagaccaggtaaggttcttcgcgttgcatcgaattaaaccacatgctccaccgcttgtgcgggcccccgtcaattcatttgagttttaaccttgcggccgtactccccaggcggtcgacttaacgcgttagctccggaagccacgcctcaagggcacaacctccaagtcgacatcgtttacggcgtggactaccagggtatctaatcctgtttgctccccacgctttcgcacctgagcgtcagtcttcgtccagggggccgccttcgccaccggtattcctccagatctctacgcatttcaccgctacacctggaattctacccccctctacgagactcaagcttgccagtatcagatgcagttcccaggttgagcccggggatttcacatctgacttaacaaaccgcctgcgtgcgctttacgcccagtaattccgattaacgcttgcaccctccgtattaccgcggctgctggcacggagttagccggtgcttcttctgcgggtaacgtcaatgagcaaaggtattaactttactcccttcctccccgctgaaagtactttacaacccgaaggccttcttcatacacgcggcatggctgcatcaggcttgcgcccattgtgcaatattccccactgctgcctcccgtaggagtctggaccgtgtctcagttccagtgtggctggtcatcctctcagaccagctagggatcgtcgccttggtgagccgttaccccaccaacaagctaatcccatctgggcacatccgatgacaagaggcccgagggtccccctctttggtcttgcgacgttatgcggtattagctaccgtttccagtagttatccccctccatcaggcagtttcccagacattactcacccgtccgccactcgtcagcgaaacagcaagctgtttcctgttaccgttcgacttgcatgtgttaggcctgccgccagcgttcaatctgagccatgatcaaactcttcaatttaaaagtttgatgctcaaagaattaaacttcgtaatgaattacgtgttcactcttgagacttggtattcatttttcgtcttgcgacgttaagaatccgtatcttcgagtgcccacacagattgtctgataaattgttaaagagcagttgcgacgcggctttcagctcactgtcgcgaggtggcgtatattacgctttcctctttcagagtcaaccctgaatttcaggatttttttctcttcgttgttccgaccatcctgtgaagtgtttcacgttgtcgtctcaacggaggcgcattatagggatcccaattttttgcacaagtatttttttgatctttttttctgtttgttgttttttcaccctttttgctgcaatcgcacacaaaacggtgcttttttgcatactaaaagacttgcacaaggccaataatgcccccaaagtcattagtaaatcatttattgctgaggtaagtatgtctgatgttttacgcccataccgcgatctttttccacaaatcggtcagcgcgtaatgatcgacgatagcagtgtcgtgattggtgacgttcgtctggctgatgatgtggggatctggccgctcgttgtgattcgtggagatgtacattatgtacagatcggagcacgcaccaatatccaggatggcagtatgttgcatgtcactcataaatccagctacaacccagatggcaacccattaaccattggcgaagatgtcactgttggtcacaaggtgatgctccacggctgcaccattggcaatcgagttttggttgggatgggcagtattttacttgatggcgcaatagtagaagatgatgtgatgattggtgcgggtagtctggtcccacaaaataaacggctggagagcggatatctgtatctcggtagccccgtcaaacagatccgcccgttaagtgatgaagagaaggctgggttacgctattccgcgaataattacgtgaaatggaaggacgaatatctggatcagggtaaccagacccagccttgatcatcttcactttgttcctgaattaagttttccgcttcttcttccaggtcccagcgatgctgacgaaaactcgctaaccactgttctggcgtatctccagtaaagcgatacgccagactctcgccagagatcgcgcatgtcagttgcataccattcacgagagcgggaaaacatacacattttttattctcgtcccactcttccctgtccggaaactggatggcctgattcacgcggacaattcctcctgcaattgctttataactggttctacgtcaggcagaacaccgtgccagagaagaaaggcatgagccgcctgtgccaccagcattcctaaaccatcagcattacgcttactgcctcgctgctcacaccatgccagaaaaggagtttttcctttctgatagaacatgtcatagcaataaatgcctggatgaatgaggctactcgggatcgccggaatatcaccactgatgccactggatgttgcattaataatgagatcaaactcatgaccttccagttcgtccatactcaacgcctgaatactgccagtgtgcgcaaacaatttagccaactcttccgcgcgggataccgtccgattagttattgtcaccgcacagtccagggaaaggagtggcagtagtacgccgcgagatgctccaccagcgccgataagcagaatacgtaaaccagggcggataaaagacagacgttccagatcgcttaacaagcctacaccatcggtattgtcacccagcaggcgtccatcttctaaccgcatgagggtattaacagcaccagccaacgctgcccgttcagtaagctcatccgctctggcaaaagcctcttctttaaaaggcaccgtcacattcgcacctttaccaccagcactaaagaaagcgttcagtgtgttgatgaaatcattgatgggtgccaacacgcgcccatagggatgttcaatattcagttgctgagcaaattgctgatgaatgaatgggcttttgctgtgggctatcggattaccaaaaacagcataggtttccattatgttacccctgtcgaaacagttcacccgtcagggcatcgcggatttcactaggatttaaacgcccccccgtttcaccaggcacaaccgggaacgccgcgccaaattgtgcgcgaacttcgtctactgttcgacaaggtggcaatccactcaagttggcactggtagaaaccagcggtttaccataagcctggcacaaagcaaccaccaacggatggtcggtgactcgtacagcaaggctatcaaagcggcccgtcaaccagcgcggtgttgtcgcaggcgcgggaaagacaaaggtgacaggacctggccagcgggaaaaaatggtttcacgctgcacgtcagtcaacatggtgtcatcaatatagggtttaagctgctcgtaatttgctgcgattaaaatcagccccttatcaaccggacgctgttttaactccaacagtcgcatcactgctgtttcgctatcaggatcgcacccaacaccgaaaacggcttccgttggataggcgatgacacgttcttcattgagaacatctatcgcagctgcgatagcgtctctttgcaggttattattcacgttattattccgcgctaaccggctttccacattgtttactggcacaaaagtgttttacaccctgcgcggttttcttttcgatgagtagcggataatgacactcagggcattctccagctatgggtttgaagttaatggcaaattgacactccgggtagcgatcacaagagtgaaatgttttgccataacgggagcggcgctggaccagatggcccgtccgacattgggggcatgtaattgctgtttcgtccggtttatcgataagttcggtatgttcgcattcagggtagttaatgcaaccaataaacataccaaagcgtccctggcgtaataccagatttgcgccacatgcagggcaaacctgcccctccagaactttgacgatatgtccatccgcactagatttcagaggacggacgtagtcacacgccggatactgactgcatccaagaaacggaccgtgtttcccggatcgaataaccagttcagccccgcactttgggcaggactcattattacgcaccgtgaacagtgcacttttcgccataacaacttatgctgaattaaagaaatgattaatgcagcataccttcattcacttcaaagagtaattcttccatttgctggtacgcattttcgcagcccggaatattgaacaacaccatcaggatcacccatttcagatcatccagttcgaactctgcgttatccagcgcgagcactcgctctatcaccatttcacgagtttcaaggttgagcacctgaatctgctcaaggaaaagcagaaacccacggcagctggcatccagtcgttcacactcttccggtgtataaatacgcatggagagaggatcgctggccagttgcatcggttctgccaacccttcctgataatcagcaagtttttccagccatagcagggcattgtagatatcttctcgctcaaaacctgcgtcggtaagatcctgttcaagtttgtcttgatccacacgcaactcagcttctgtgtgaatataggtttcaaacaaatacattagtacgtcgaacatggcatgccctcctcaatcggacatagccgccgggtacagctgcgatccatcctgctaactccagttcgagtagttgagtaactacctctggcacaggttggccggcacgttcagcgacgacgtcaacaggtgttacctcatctcctacgttagccaggagctcaggaaatggcaatgccacgtcttgctgatctggactataaaaactattttcaggggcgtctggcaaccagtgcaatccaaattgcaagttttccagaatttcttccggttccgtcacaagaatcgcaccttgttttattaaccagtgaggcccttcgcttcccggattccctattggacctggcaaggcaaaaacttctcgcccctgctcaagcgcacaacgtgctgtcaccaggctaccactacgcaaagccgcttccaccaccagtacacctttacttagaccactgataatgcgatttcttcgtgggaaattgtaagcaaggggtggaacatcgaggggaaattcgctgacgagagcgcccccctgttcaagcagactggcagccagtcgggcatgacggcggggatgaatggtattaagtccattccccaatacagcaatgctgacgccatttacctgtaaggctgctttatgcgctacaccatcgattccacgcgccagtccactcgtaattgtcactccacgcgtcgccagagtttcgcaaaataatcgtccccatcgctcgccataccaactatgcgcccgactccccactacggcaagctgaaaactatgcagcgcgtgcagttctccttcaacaaacagtgcgccggggtaatctgtcgtcgccagaagttgaggaggataaaattcgctgtccgcaggaattaaatgatggttgggttgctccaaccaacaaagactgctttcgatactctttcgtggaaaactaagaaagcgttgtgcctgccgcaatgtaagccctgtttgctgcaatacaaccgcatcaatatggctctgttttgccacccagtgagcgatacggaccatatcatcgccgtacaagctgctgatactcattaaacgcagccaaatttctgtatcgaccatccttatctccctgccataagcagccttagcaatctttgcgattggtcagtgatgctgtcaatcagagggggatttgtctagaatagaagaaataatctttctaactcctgaacacatctctggagatttatgagcgttttgcaagtgttacatattccggacgagcggcttcgcaaagttgctaaaccggtagaagaagtgaatgcagaaattcagcgtatcgtcgatgatatgttcgagacgatgtacgcagaagaaggtattggcctggcggcaacccaggttgatatccatcaacgtatcattgttattgatgttagcgaaaaccgtgacgaacggctagtgttaatcaatccagagcttttagaaaaaagcggcgaaacaggcattgaagaaggttgcctgagcatccctgaacaacgtgctttagtgccgcgcgcagagaaagttaaaattcgcgcccttgaccgcgacggtaaaccatttgaactggaagcagacggtctgttagccatctgtattcagcatgagatggatcacctggtcggcaaactgtttatggattatctgagtccgctgaaacaacaacgtattcgtcagaaagttgaaaaactggatcgtctgaaagcccgggcttaaggataagaactaacgtgagtgaaagtctacgtattatttttgcgggtacacctgactttgcagcgcgtcatctcgacgcgctgttgtcttctggtcataacgtcgttggcgtgttcacccagccagaccgaccggcaggacgcggtaaaaaactgatgcccagcccggttaaagttctggctgaggaaaaaggtctgcccgtttttcaacctgtttccctgcgtccacaagaaaaccagcaactggtcgccgaactgcaggctgatgttatggtcgtcgtcgcctatggtttaattctgccgaaagcagtgctggagatgccgcgtcttggctgtatcaacgttcatggtagtctgctgccacgctggcgcggtgctgcaccaatccaacgcagtctatgggcgggtgatgcagaaactggtgtgaccattatgcaaatggatgtcggtttagacaccggtgatatgctctataagctctcctgcccgattactgcagaagataccagtggtacgctgtacgacaagctggcagagcttggcccacaagggcttatcaccacgttgaaacaactggcagacggcacggcgaaaccagaagttcaggacgaaactcttgtcacttacgccgagaagttgagtaaagaagaagcgcgtattgactggagtcttagcgcagcacagcttgaacgctgcattcgcgctttcaatccatggccaatgagctggctggaaattgaaggacagccggttaaagtctggaaagcaagcgtcattgatacggcaaccaacgctgcaccaggaacgatccttgaagccaacaaacaaggcattcaggttgcgactggtgatggcatcctgaacctgctcagcttacaacctgcgggtaagaaagcgatgagcgcgcaagacctcctgaactctcgtcgggaatggtttgttccgggcaaccgtctggtctgatagtccactcttctaagcccggtcttgccgggcgtttttatacttatgaaaaaacaacgtaatttacgtagcatggcggcccaggccgttgaacaagtcgtcgagcaagggcaaagtttaagcaacattctgccaccgctccagcaaaaagtttccgataaagacaaagcacttcttcaagagttgtgctttggcgtactgcgtacgcttagccagttagactggctgattaataagttaatggcccgtccgatgaccggcaaacagcggaccgtgcattacctgattatggttggtttgtatcaactgctttatacccgcattccacctcatgctgcgctggctgaaacggttgaaggcgctatcgcaattaagcgtccgcaacttaaagggttgataaacggtgtattacgccagttccagcgtcagcaagaagagttattagccgagtttaatgccagtgatgcacgttatctgcatccttcctggttgctgaagcgtctgcaaaaagcgtatccagagcagtggcaatccatcgtcgaagccaataaccagcgtccgccaatgtggctgcgtattaatcgtacgcatcattcccgcgacagctggcttgcattgctggatgaagcaggaatgaaaggtttcccgcatgcggattaccctgatgctgtacgtctggaaacacctgcacctgttcatgcgctacctggttttgaagacggatgggttaccgttcaggatgcaagtgcacaaggttgcatgacctggcttgcgccacaaaacggtgaacacattttggatctttgtgccgcccccggcggtaaaacaacgcatatccttgaggtggcaccagaagcgcaggttgttgcggttgatatcgacgaacagcgcctctctcgggtttacgacaatttaaaacgccttggtatgaaggcgaccgtgaaacaaggtgatggccgttacccttctcaatggtgtggcgagcaacagtttgatcgcattttattagatgcgccttgtagtgcaaccggtgtgattcgtcgccatccagatattaaatggttacgtcgcgatcgcgatatcccggaactcgcgcaattgcagtctgaaattctcgacgccatttggccgcatttaaaaaccggtggaactctggtctatgccacctgtagcgtgttaccggaagagaatagcctgcagattaaagcctttttgcaacgtaccgctgatgccgaactttgcgaaacaggaacaccagagcaaccgggtaaacaaaatctacctggtgccgaagagggcgacggcttcttttacgctaagctaatcaaaaagtgatgagataacgggtcgcgactgatgaaaattatcattctgggtgccggccaggttggcggcacactggcggaaaacctggttggcgagaacaacgatattactgttgtcgataccaacggtgagcgtctgcggaccttacaggataaatttgacctgcgggtcgtgcaggggcatggctctcatccacgcgtattgcgggaggcaggtgccgacgacgccgatatgctggttgctgtaaccagtagtgatgaaaccaatatggttgcctgccaggtagcctacagtcttttcaacacccctaatcgcatcgctcgtatccgcagtccagactacgtgcgcgatgccgataagctatttcatagtgatgctgtgccgattgatcatctgatcgcaccagagcagttggttatcgataatatttaccgactgattgagtatcccggcgcattgcaggtggtgaacttcgctgagggtaaagtcagcctggctgtggttaaagcctattatggcggcccgctgattggtaatgcacttagcaccatgcgcgaacatatgccacatatcgatactcgtgtggcagcaattttccgccacgatcgccccattcgtccgcaaggtagcaccattgttgaagctggtgatgaagtgttctttattgccgctagtcagcatatccgcgcggtgatgagtgaattacagcgactggaaaaaccgtataagcggatcatgctggttggtggcggtaatatcggtgcagggctggcgcgtcgtctggaaaaagattacagcgttaaactcatcgaacgtaatcagcagcgcgctgccgaactggcggaaaagttacagaatacgatcgtcttttttggtgatgcgagcgatcaagaactactggccgaagaacatatcgatcaagttgatctgtttattgccgtcaccaacgatgacgaggccaatatcatgtccgccatgcttgccaaacgtatgggtgcgaaaaaggtgatggtattgatccagcgtcgcgcttatgtggatctggttcaggggagcgttatcgatattgcgattagtccacaacaagcaactatttctgcgttgcttagccatgtgcgaaaagcagatattgttggtgtttccagtttgcgccgcggcgtagcagaagctattgaagccgttgctcacggtgatgaaagcaccagtcgcgttgtcggcagagtcattgacgaaatcaagctaccgccaggaacgattattggagcggtggtacgtggaaacgacgtgatgattgccaatgacaatctgcgcattgagcaaggcgatcacgtaattatgttcctcacagataaaaagtttattaccgacgtcgaaagactcttccagccaagccctttcttcttgtaattaataaggcgtctaatgacgccttattatttccctttgattatcaaggattaattaaattcattcctggcaggaaaatggcttaacatttgttagacttatggttgtcggcttcatagggagaataacatgagcattattaaagaatttcgcgaatttgcgatgcgcgggaacgtggtggatttggcggtgggtgtcattatcggtgcggcattcgggaagattgtctctagtctggttgccgatatcatcatgcctcctctgggcttattaattggcgggatcgattttaaacagtttgctgtcacgctacgcgatgcgcagggggatatccctgctgttgtgatgcattacggtgtcttcattcaaaacgtctttgattttctgattgtggcctttgccatctttatggcgattaagctaatcaacaaactgaatcggaaaaaagaagaaccagcagccgcacctgcaccaactaaagaagaagtattactgacagaaattcgtgatttgctgaaagagcagaataaccgctcttaacaagcgccactaagcagaagaccagtggtaaaaaagtgatttactttcttgccactggcctcccagttcccccgattgccatgttttccttttcgcatgtaactgcctttccccttcttatttttctctacgcgctgtcggaataagggatcatgtagtaatgcttctatcgcattatcctttatctgccctttagtatgctgatatcgactcataaaaactccagttggttatttaacggcgcgagtgtaatcctgccagtgcaaaaaatcaacaaccactcttaacgccactcgccccttgttcaagagcttcaagaatgctacaataaacactgctatgagcagtcccacaacaggcatcgttaaggcgttgcaaggaacgctgcatactctgcaactcggctatccgtgcttcgacttcctgcaatctttcctgcacaatgcctttactctcctgacaggtatggtgttcaggatcgatgcggatgctcagcaactcgcggatgctctccagactgaaacctagttgtctggcatggcggataaatttcaatcgctggagatcgctttcggtatataggcgaaacccaccttcagtacgcacttcatgctccatcatctgctgtttttcgtaataacgaatcgtgtcgggtgttacttccgccatttttgccagctcaccaatgcgatacatacatactccattagttatcgttgattttgtccaacaacttgtcagcataatcgccgcgtaaaaaatcggtactcaatccagcttgtcgcagcttcaattccagtaaactcaatcgacggctaacctcttgatattgcggatcatcgtgacggatacctttgagaatatccagaagctgaattgcttctctccgttgctcaagttctggcggtaagcaaccggcattcttcagcaagcgataccccgcacgtaattccggtggcacgtgagaatcatcatccagtatcaatggttcgccgctacctgccaggttatcaaactcacctttcgcttgcgcttctgctatatggcgctctgcccactggtcaagtaaccacataaatactccaggggatgaacaaaaagagtacagctattgtagataagtggggatactacgggtataaaaaaacccgccggggcgggtttttttacgttgcttcagattactctgcagcagcttctgctttctcactacgatcaaccagctcgatgtaagccatcggcgcgttgtcgcctgcacggaagccacacttcagaatacgagtgtaaccaccggcacggctcgcgaaacgcgggcccagttcgttaaacagttttgccacgatctcgttatcacgagtacgggtgaatgccagacgacgattagcaacgctatcagtcttggcaagagtaatcagcggctcaactacgcggcgcagctctttcgctttaggcagagtcgtcttgatgatttcatgacgaaccagactacctgccatattgcggaacatagcctggcgatggctgctgttgcggttcagttgacgaccactcttacgatggcgcatgaccttatccttctcagtaaaaccttaacctgtgattcggttactcgtcagcgatgcttgccggtggccagttttccaggcgcatgcccagagacagtccacgggaagccagcacgtctttaatctcagtaagagattttttaccaaggttaggcgttttaaggagctcaacctcggtacgctgtaccagatcaccgatatagtggatagcttctgctttaaggcagttagcagagcggacagtcaattccagatcgtcaacagggcgcagcaggatcggatcgaactctggtttctcttctttcacttcaggctgacgtacatcacgtaagtcaacgaaagcttccagttgttcagccagaatggttgccgcacgacgaatcgcctcttcaggatcgattgtgccgttggtttccatttcgatgaccagcttgtccaggtcggtacgctgttctacacgcgctgcttcaacattgtaggcaatacgctccacagggctgtagcatgcgtcgaccagcagacggccgattgggcgctcatcttcttcgctatgaattcgggtagaagccggcacataaccacgaccgcgctgaactttgatacgcatgctaatagacgcgttctcatcggtcaggtggcagatcacgtgctgcggcttgacgatttcgacatcaccgtcgtgggtgatatcggctgcagtcacagggccaatgccagatttattcaaggtaagaataacttcatctttgccctgaactctcaccgccagccctttcaggttgagcaggatttccaggatatcttcctgaacgccttctttggtgctgtactcatgtagtacaccatcaatctcaacctcggtcaccgcgcaacccggcatgctactgagcagaatacggcgcagtgcgttacccagagtatggccaaagccacgctctaaaggctcaagggtcaccttggcgtgcgtgctactcacttgctcgatatcaaccaggcgcggttttagaaactctgtcacagaaccctgcattgtgtcctctctttggtactaagctttacttggagtaaagctcgacgatcaggtgttcgttaatgtccgcagacagatcagaacgctccggcttacgcttaaacgtaccttccatcttgccagcatcaacttccagccaggttggcttttcacgctgctcagccagctccagagcggctttcacgcgagactgcttcttcgctttctcacgaatgcttacaacgtcattcggactaacctgataagaagcgatgttaacaacacgaccgtttaccataattgctttatggctaaccagctgacgtgcttctgcacgagtggcaccgaagcccatacggtatacaacgttgtccagacgaccttccagcagagccaacaggttttcaccggtgttgcctttcagacgtgctgcttctttgtagtagttacggaactgacgctccagcacaccatagatacggcgaactttttgcttttcacgcaactgcacaccatagtcagacagacgcggtttacgcgcaccgtgctggccaggagcttgttcaattttacacttggtatcgatcgcgcgaacgccagacttaaggaataagtcggtgccctcacgacggctcagcttgagcttaggacccaaatatcttgccattttctttctccaacaaacctggaaaacgaggcgttatacgcgacgttttttcggcggacgacaaccgttatgagggatcggagtcacatcagtaatgttagtgatgcggaaacctgcggcgttcagagcacgaatagtagattcgcggcctggacccggacctttaaccataacttccagattcttgatgccgtattctttcacggcgtcagcgcaacgctctgctgcaacctgagctgcaaacggagtggatttgcgagaaccacggaaaccggaaccaccggctgttgcccaacccaacgcgttaccctgacgatcagtgatagtcacgatggtgttgttgaaagaagcatggatatgagccacgccgtcagagacttgttttcttacacgtttacgtgcacgaattggtgcctttgccattattcaatcaccccgattatttcttgatcggtttgcgcggacccttacgggtacgtgcgttggtcttggtacgctgaccgcgaaccgggagaccacgacgatgacgcaaaccgcgatagcaaccaagatccatcaggcgcttgatgctcatgctgatttcacggcgcagatcaccttcaacgacaaatttggcaacttcgtcacgcagcgtgtcgatttgtccttcagacagctcactgatcttaacatcttcagcgatacccgctgcagccaggatggctttagaacgggtcttgccgacgccataaatgctagttaatgcgattacggcatgcttatgatcaggaatgttaatgcctgctatacgggccactatgcactcctactatttaatatgtacgttccatgctgaaaagcccgttttcaggatactcaaatggaaacgcacagacatacaaaagattggctggctaatctagccagctcaacccaactttgcaagaaaaatatgcgaaaaaatcagccttggcgctgtttatgcttcggctcggcactgcaaatcacacggatgacaccatcacgcttaacgattttgcagttacggcataatttcttgacggaagcacgaactttcatttttactctccgtaacttctcgggcgaccaattatcggccgtagcctttcaggttcgccttcttcaatgcagactcatactgactggacatcatcagagtttgcacttgagccataaagtccataatcacgacaacaacgataagcagactggtcccaccgaagtagaacggtactttcattgcatcacgcatgaactccgggatcaggcagataaaggtaatatacagcgcaccaaccagggtcaggcgggtcattactttatcgatatacttcgccgtttgctctcccggacgaattcctggtacaaatgcaccggacttcttcaggttatctgctgtttcacgcgggttgaaaaccaacgccgtgtagaagaaacagaagaagatgattgcagacgcatagagtaacacataaagcggttgcccaggctgcaaatacaggctaattgttgtcagccagttccaaccagtaccgcccccgaaccaactcgcgatggtcgccgggaacagaataatactggaagcgaagattgccgggattacccccgccatattcactttcagcggtaaatgtgtgctctgtgcagcatagacacgacgaccttgctgacgtttcgcgtagtttaccacaatgcggcgttgaccacgctcaacaaatacaacaaagaacgtcactgcaaatactaatactgcaaccaacagcaacacgaggaagtgcaggtcgccttgacgcgcttgctcgatagtatgggcaatggctggcgggagtcccgcgacaataccggcgaagataatgatactaataccgttgccgatacctcgttcagtaatctgttcgcccaaccacatcaggaacatggttcctgtgaccagacttacaacagcggtgaagtagaatgcaaagcccgggttaatcaccaggccttgcataccaggcatattcggcagaccggtagcaataccgatgctctggaatattgccagcaccagagtaccgtagcgggtgtactggctgatcttacgacgaccagactccccttctttcttaatttctgccaacgttgggtgaaccaccgtcagcagctggataatgatgctcgcgctaatatacggcatgatccccagagcaaagatagaagcacggctgagagcaccaccagagaacatgttaaacatctcaatgatggtgcctcgctgttgctcaagcagtttggcaagtacagcggcatcaataccagggatcggaataaaagagccaatacggaacacaatcagcgcaccgataacaaacagcagtctgcgtttcagctcgcctaagccacctttggcactttgaaaatctaatcccggttgtttagccatctgctacttattcctcgattttaccgccagcagcttcgatagcagcacgagcgcctttagtaacacgcaggccacgaacagttaccggagtcgttacttcgccagccaggatcactttcgcgaactcgatctggataccgataatgttagccgctttcagcgtgttcaggtctactacaccgccttctactttagccaggtcagacagacgaatttcggctgtaatcgctgctttacgagaagtgaagccgaatttcggcagacgacggtacagaggcatctgaccaccctcgaaaccgcgacgtacgccaccgccagaacgagacttctgacctttgtgaccacgaccaccggttttaccgaggccagaaccgataccacgacccaggcgtttacccgcctttttggagccttcggccggagacagagtatttaaacgcatctcttactcctcaactttaaccatgaaggaaaccgcgttgatcataccgcgaatagcaggagtatcctcgcgctctacggtgtgaccaatacgacgcagacccaggccaagcagcgttgccttgtgtttcggcagacgaccgattgcactgcgggtttgagtaattttaatagtctttgccatggtttatttccccagaatttcttcaacggatttaccacgcttggcagcgaccatttctggagaattcatattttccaggccatcaatagttgcacgaaccacgttgatcgggttggtggaaccataggctttagccagaacgttatgaaccccagcgacttccagaacggcgcgcattgcaccaccggcgatgataccggtaccttcggaagccggctgcatgaatacgcgagaacccgtgtgaacacctttaacagggtgttgcagagtgccgttattcagcgcgacgttaatcatattgcgacgggctttttccatcgctttctggatcgctgctggaacttcacgcgctttaccgtaaccaaaaccaacgcgaccgttaccatcgccaactacagtcagagctgtgaaggagaaaatacgaccacctttaacggttttagatacgcggtttaccgcgatcagcttttcctgcagttcgccagcttgtttttcgatgtgagccatcttacacctctaccttagaactgaaggccagcttcacgggcagcatctgccagtgcctggacacgaccatgatattggaacccggaacggtcaaaggatacatctttgatgcctttttccagagcgcgttcagcgacagctttacccacagctgcagccgcgtctttgttaccggtgtacttcagttgttcagcgatagctttttctacagtagaagcagctaccagaacttcagaaccgttcggtgcaattacctgtgcgtaaatgtgacgcggggtacgatgtaccaccaggcgagttgcgcccagctcctggagcttgcggcgtgcgcgggtcgcacgacggatacgagcagatttcttatccatagtgttaccttacttcttcttagcctctttggtacgcacgacttcgtcggcgtaacgaacacccttgcctttataaggctcaggacgacggtaggcgcgcagatccgctgcaacctggccgatcacctgcttatcagcgcctttcagcacgatttcagtctgagtcggacattcagcagtgatacccgcaggcagctgatggtcaacaggatgagagaaacccagagacaggttaatcacattgcctttaaccgctgcacggtaacctacaccaaccagctgcagcttcttagtgaagccttcggtaacaccgataaccatactgttcagcagggcacgcgcggtaccagcctgtgcccaaccgtctgcgtaaccatcacgcggaccgaaggtcagggtattatctgcatgtttaacttcaacagcatcgttgagagtacgagtcagctcgccgtttttacctttgatcgtaataacctgaccgttgatttttacgtcaacgccggcaggaacaacgaccggtgctttagcaacacgagacattttttcctccgattaggctacgtagcagataatttcgccaccaagaccagcctggcgcgctgcacgatcagtcataacacctttagaggtagaaacaactgcgatacccagacccgccataactttcggcagctcatctttacgtttatagatgcgcagacctgggcggctgacacgctgaatgctttctacaacagctttgccctggaaatacttcagagtaagttccagttcaggcttggtgtcgccttcaactttaaaatcttcaataaaaccttcttccttcagcacgttggcgattgccactttcagcttggaggaaggcatggtgaccgcagctttgttcgcggcctgaccgttacggatacgggtcagcatatccgcgatcggatcttgcatgctcatctgtctttactcccgtgattcaattggtgacaattaccagctagcctttttcagacccgggatttcaccgcgcatagcggcttcacggaccttaatacggctcaacccgaacttccgcaggaaaccatgcggacgacctgtttgacggcagcggttacgctgacgagacgggctggaatcacgcggcagagtctgcagcttgagaacagcgttccaacgatcttcgtcggaagcgttcacatcagagatgatcgctttcagttcagcgcgtttcgcgaagtatttatcagctaaagctacgcgttttacttcgcgtgctttcatactttgcttagccatttagtaaccctaccttacttgcggaacgggaagtcaaaggcagccagcagagcgcggccttcttcgtcagatttcgcagtagtggtaatggtaatatccaaaccacgaacgcggtcgactttatcgtagtcgatttctgggaagatgatctgctcacggacacccatgctgtagttaccacgaccgtcgaaagacttagcggacaggccacggaagtcacggatacgaggtacagcaatagtgatcaggcgctcaaagaactcccacatgcgttcgccacgcagagttactttacagccgatcggatagccctgacggattttgaagcctgcaacagatttgcgtgctttggtgatcagcggtttttgaccggagattgctgccaggtctgctgctgcgttatccagcagttttttgtcagcgatcgcttcaccaacacccatgttcagggtgatcttctcgacccgagggacttgcatgacagaattgtagttaaactcagtcatgagttttttaactacttcgtctttgtagtaatcatgcagtttcgccatcgtactactccaaattacttgatagtttcgctgttagacttgaagaaacggacttttttaccgtcttcgaatctaaagcctacacggtcagccttgccggttgccgcattgaagattgctacgttggaaacctgaatagcggcttctttttcaacgatgccacccggttggttcagggccggaaccggcttctgatgtttcttaaccaggttgataccttcaacaatgaccttgccggaagacaggacattcttaactttaccgcgtttacctttatctttaccggttaacacgataacttcgtcatcacgacggattttcgctgccatgattcgctccttagagtacttctggtgccagagagataattttcatgaacttctcactacgaagctcacgagttaccggcccaaaaatacgcgtaccgataggctgctcgctgttgttgttcagaagaacacaagcattaccatcgaagcgaatgacagaaccgtccgggcgacgaacacccttcttggtgcgcaccactaccgccttcagcacatcaccttttttgaccttaccacgcggaattgcttctttgatggtgatcttgatgatgtcgcctacgcctgcgtagcgacggtggctgccacccagaaccttgatacacattacgcgacgtgcaccggagttgtcggcgacgttcagcatagtctgttcttggatcattttagtgctccgctaatgtcaactactactgagacccgaaaatcaggtcgttaaaaatccccatatcgagggcgcggcattataacaccgcttcaaggatatgggtagaaaaaataaacggctcatttctgagccgtttattcgtattgagagagtgtactgtattacagaaccgctttctctacaacgcgaaccagcgtccaggatttagtcttggacagcggacggcattcgcggatttcaaccacgtcaccgataccgcattcgttgttctcgtcatgtacgtgcagtttggtcgtacgcttgatgaatttaccgtagatcgggtgtttcacaaaacgttcgatagcaacaacaatggatttctccattttgtcgctaacaacgcgaccttgcagagtacggattttatcggtcattacgcacccgccttctcgttcagtaaagtcttaacgcgtgcgacatcgcgacgcacttgcttcaacaggtgagactgttgcagctggccacttgcagcctgcatacgcaggttgaactgctcacgcagcaggttcagcagctcggtgttcagctcttcaacgctcttctcacgcagctcttttgctttcattacatcaccgtcttagttacaaaggtggttttaatcggcagtttcgctgctgccagcttgaatgcttcacgggccagctcttccggaacaccgtccatttcatacaggactttacccggctgaatcaaggcaacccaatactccacgttacctttacctttacccatacgcactgccagcggcttttcagtgatcggtttgtccgggaacacacggatccagatcttaccttgacgcttaactgcacgggtcatagcacgacgtgctgcttcgatctgacgggcagtcagacgaccacggccaacagctttcagaccgaagctgccgaagctaacatccgtaccctgcgccagaccgcggttacggcctttgtgcattttacggaattttgtacgctttggttgtaacatcagcgacgctccttatttacggcctttacgctgctgctttttaggctgagcagccggtttttccggttgttcaacagcagccataccacccaggatctcgcctttgaagatccacactttaacgccgattacaccgtaagtggtgtgcgcttcagaggtgttgtagtcgatgtcagcacgcagagtgtgcagcggtacgcgaccttcgcggtaccattcggtacgtgcgatttccgcgccgcccagacggccgctaacttcaactttaatacctttagcgcccagacgcattgcgttctgtacagcacgcttcatagcacgacggaacataacgcgacgttccagctgagaagtgatgctgtcagcaaccagttttgcgtccagttcaggcttacgaacttcggcgatgttgatctgtgcaggaacgccagcgatgtccgctacgaccttacgcagtttttctacgtcttcaccttttttaccgataacgatacccgggcgagcagtgtgaatggttacacggatgctcttagccggacgctcgataacgatacgagatacggacgctttagccagttccttagtcaggtactgacgtactttaaaatcgctgtccaggttgtcagcgaattctttggtgttcgcaaaccaggtagagttccatggttttacaatacccaggcgaataccattaggatgtactttctgacccattgctagtctccagagtctcagcgatcggacacaaccacagtgatgtggctggtgcgcttcaggatgcgatctgcacgaccttttgcacgcggcataatgcgcttcatgctcgggccttcgtctacgaaaattttcgtaactttcagatcgtcaatgtcagcgccatcgttgtgttcagcgttagcaatggcagattccagaactttcttgaccagtacagccgctttcttgttggtgtaggtcaaaatatccagagcctggctcactttcttaccgcgaatcaggtcagcaacaaggcgaaccttctgagcagaagaacgagcatggcgatgtttagcgatagtttccatctcttcctcctaccttatttcttcttcgcttttttatcagcagcgtggccgcgataagtacgagtcggtgcgaattcacccagtttgtgaccaaccatttcgtcggttacaaataccggaacgtgctgacgaccattatggacagcgatggtcaaaccgatcatgttaggaaagatcgtactacgacgggaccaagtgcgcaggggcttcttgtctccgctttccaccgctttctctaccttcttcagcaagtgcaggtcaataaaaggacctttcttgagagaacgtggcatggcttatcctctaaaattatttgctacggcgacgtacgatgaatttatcagtacgcttgttgctgcgggtcttcttacctttggtctgaacgccccacggagttaccgggtgcttaccaaagttacgaccttcaccaccaccatgtgggtggtctaccgggttcatcgcggtaccgcgaacggtcggacgaacaccacgccagcgtgcagcacctgctttacccagaacgcgcagcatatgctcagcattgccaacttcgcccagagttgcacggcagtctgcttctactttacgcatttcaccagaacgcagacgcagggtgacataagcaccatcacgagcaacgatctgaacgtaagtaccagcggaacgtgccagctgaccgcctttacctggtttcatttctacgttatgaacagtagaaccaaccgggatgttgcgcatcggcagggtgttacctggtttgattgcagcatcaacgccagactgaatctggtcgccagctttcaggcctttaggggccaggatgtaacggcgttcaccgtctttgtacagaaccagcgcgatgttcgcggaacggttcggatcgtactcaagacgttcaacaactgccgggataccgtctttgttgcgtttgaagtcaacaatacggtaagcctgcttgtggccaccaccgatatgacgagtggtgatacggccattgttgttacgaccaccggatttgctgtttttttccagcaacggagcaaaaggtttgcccttgtgcagctcagggttaaccactttaactacgtggcgacgacccggagatgtcggtttacatttaacaactgccattgtattactcctccgacttactcagcgccgccaacgaagtccagattctggccttctttcagggtgacgtaagcttttttccagtcgctacgacgaccgatacgctgtccgtgacgtttaactttccctttaactaccagggtgttaacgacttcgacttcgacttcaaacagtttctgcacagcagctttgatttctgctttggtcgcgtctttagcaactttgagtacgatggtgttggatttttccatcgcagtagacgctttttcagaaacgtgcggtgcacgcagcaccttcagcagacgttcttcacgaatcatgccagcatctcctcaacttgcttaacagcatcagcagtcattacgactttgtcgaaggcgatcaggctaaccgggtcgataccagttgcatcgcgtacgtcaaccttgtgcaggttgcgcgcagccaggaacaggttttcgtccagctcaccggtgatgatcagcacatcttccagagccatgtctttcagtttctgtgccagcagcttagttttcggcgcttctacagagaacttctcgacaacgatcagacgatcctgacgtaccagttcggacaggatgcttttcagcgcgccgcggtacatcttcttgttaactttttgactgtggtcctgcggacgagcagcaaaggtcacgccaccagaacgccagatcgggctcttgatagaaccagaacgcgcacggccggtgcctttctggcgccacggttttttaccggaaccagttacttcagcacgagtcttctgagcacgagtaccctgacgagcaccagctgcataagcaacaacaacctggtgaaccagcgcttcgttgaaatcacgaccgaaggtagtttcggaaacagtcagcgcgctctgcgcgtctttcaatactaattccattgctatctccttacgccttcacagctggtttaacgatcaggtcgctaccggttgcacccgggacagcacctttaaccagcagcaggttgcgctcagcgtcaacgcgtactacgtcaaggctctgaacggttacacgttcgttacccatctgacctgccattttcttgcctttgaacactttgcccggagtctggttctgaccgatagaacccggaacgcggtgagacaaggagttaccgtgagtagcgtcctgggtacggaagttccagcgcttaacggtacctgcgaaacctttacctttagaggtgccagttacgtcaacttttttaacgtcagcaaacagttcaacgctaatgctctgacctacagtgaactcttcgccttcagccaggcggaattcccacagaccacggccagcttctacgccagctttagcgaagtggccagcttcaggcttggtcacacggttagcttttttagcaccggtggtcacctgaatagcacggtagccatcgttagccaggtctttaacctgagtaacgcggtttgcttcaacttcgattacggttactgggatagaaacgccgtcttctgtgaagatacgggtcatacccacttttttaccgactaaaccaatcattgtttcaacctctcaatcgctcaatgacctgattaacccaggctgatctgcacgtctacaccggcagccagatccagacgcatcagagcatcaacggttttctcggttggctcaacgatgtcaaccagacgcaagtgagtacggatttcgtactgatcgcgcgcgtctttgttgacgtgcggggagatcagaacagtgaagcgctctttgcgtgtcggcagcgggatcggaccacggacctgcgcaccagtgcgcttggcagtctcgacgatttccgcggttgcttgatcgatcagacgatgatcaaacgctttcaggcggatacggattctttggttctgcatgagaccagagctccaattattttataaacgaaaatgattactcctcagacccattacgattgatgggagagtgtaaccgttcttacgtagctccccgattgggagcattgttaggtagccaaattcggctaactgaggttcagattgaacctgctgtcaactacgacaagcccgcgcattatacatacttaaccaccgaacgcaagcgtattgctagtaaagtaaacagccttcgggttatctctcaagttcgttcagtgcatttttgacacgctctcttaaaccggctttctcttcgctttcttccacagtattttcttcgtcttcagaagaagagggggcattctcaaccgcgacgcctgggtcatcttcctcctcgacggattcgacgacggggagtggctgttttttgaagaaatagtgttgtgtactttgtttaaaagcgggcgtttcagcctctacagtgacttcggcttttactatccaaagcacccatagctgcctggcatacccaccaaccagcaccattcctgcaaaccacaggcaaatcagtaataaacaaattacatatattatggtgctgtgtttttgtcgggagaagataccagggtgacctgtttctttctgctcacgcgcggcgatatagaattcaaacattataatcccttgtgacgtaaaaactgcaaaacaaaagtcctacgcaggaattatttacgttttacgagaacccttcaatatgaattaaattacggcattaaaaataagaaaaaagcctgacaaatgaagcattttaaaaacagaaacattcatatttaaaatgttaaattgaattgatattttaaatatgaataatttattcgttctgacagtacgaataagatatgccgtcaacaaatgcaaaaagggcgccgaagcgcccttttcaattcaaaactaattaacgtgtaattagcccagaactttagcaacaacgcccgcgccaacggtacggccgccttcacggattgcgaaacgcagaccgtcgtccatcgcgatcgggtggatcagggtaacaaccattttgatgttgtcgcccggcattaccatctctacgccttccggcagttcgatggtaccagtcacgtcagtagtacggaagtagaactgcggacggtagcctttgaagaacggagtatgacggccgccttcatctttggacagaatgtacacttcagattcgaacttggtgtgcggcttgatggtgcccggcttagccagtacctgaccacgttcgatttcttcacgtttgataccacgcagcagaacacctacgttctcaccagcacggccttcgtccagcagtttgcggaacatttcaacgccagtacaggtagacttctgagtctctttgataccaacgatttcaacttcttcaccaactttgatgataccgcgttctacacgaccggtaacaacggtaccacgaccggagatggagaatacgtcttcgatcggcagcaggaacggcttgtcaatcgcacgctctggttccggaatataagaatccaggaagccagccagttccaggattttcgcttcccactctgcgtcgccttccagcgctttcagagcagaaccacgaacgatcggagtgtcgtcgcccgggaagtcgtactgagacagaagttcacgaacttccatttcaaccagttccagcagctcttcgtcatcaaccatgtcgcatttgttcaggaacacgatgatgtacggaacgcctacctgacgacccagcaggatgtgctcacgagtctgcggcatcgggccgtcagtcgcagcaactaccaggatcgcgccgtccatctgagcagcaccggtgatcatgtttttaacatagtcggcgtgccccgggcagtctacgtgtgcgtagtgacgggtcggggtgtcgtattcaacgtgagaagtgttgatggtgataccacgagctttttcttccggcgcgttatcgatctggtcgaatgcacgagcagcaccgccgtaggttttagccagtacggtggtgattgcagcggtcagagtagttttaccgtggtcaacgtggccgatagtaccaacgttaacgtgcggttttgtacgttcaaatttttctttagacacggctatattccttactatagtgctctccccttcaggagagagcacgggactttggtattaacccttaggcttatttaccacgggcttcaattacggcctgagcaacgttactcggcgcttcatcatacttcaggaattccatagtgtaacttgcacgacctttggtcagagaacgcagctgagttgcgtatccgaacatttcagacagcggtacttcagcgtggatcttaacgccagtaacttcagattcctgacctttgagcataccacgacgacggctcaagtcaccgataacgtcaccggtgttctcttccggagtttctacttcaaccttcatgatcggctcaagcagaactggtttcgctttcttaaagccttctttaaaggcgatagaagcagccagtttaaacgccagttcagaggagtcaacgtcatggtaagaaccgaagtgcagacgaatacccatgtctactaccgggtagcctgccagcggacctgctttcagctgttcctggatacctttatcaacggccgggatgtattcgccagggattacaccacctttaatgtcgttgatgaactcgtagcctttcgggttactacccggctccagcgggtacatgtcgataacaacatgaccatactgaccacgaccaccagactgtttcgcgtgtttaccttcaacatcggtaactttctggcggatagtttcacggtaagcaacctgcggtttacctacgttcgcttcaacgttgaattcacgcttcatacggtcaacgatgatgtcgaggtgcagttcgcccatacccgcgatgatggtctggttagattcttcgtcagtccatacacggaaagacgggtcttctttagccagacggcccagagccagacccattttttcctggtcagctttggttttcggttcaactgcgatggagattaccggctcagggaattccatacgttccagaatgatcggcgcatccgggtcacacagggtgtcaccagtggttacgtctttcagaccgatagcagcagcgatgtcgcccgcgcgaacttctttgatctcttcacgtttgttagcgtgcatctgaacgatacgaccgaaacgctcacgtgcagctttcacggagttcagtacggtatcaccagagttaaccacaccggagtaaacacggaagaaggtcaggttaccaacaaacgggtcggtagcgattttgaacgccagtgcagagaacggctcgtcatcacttgcgtgacgttcagccggagtgtctttaccgtcgtccaggataccgttgatcgcaggtacgtcaaccggggatggcaggtaatcaattaccgcatccagcatcgcctgaacacctttgttcttgaacgcagaaccacaggttaccaggatgatttcgttgttcagaacgcgctgacgcagagcacctttgatttctgcttcagtcagttcttcaccacccaggtatttttccatcagctcttcagaagcttcagctgcggattcgatcaggttctggtgccattcgttagccagttcaaccatgtctgccgggatatcttcgtattcgaaggttacgccctggtcagcgtcgttccagttgatagctttcattttcaccaggtcaacaacaccggtgaaatgttcttcagcaccaatcgccagctgcagcggaaccgggttcgcgcccagacgggttttgatctggttaacaactttcaggaagttcgcacccatgcggtccattttgttaacgaacgcaatgcgcggaactttatatttgtttgcctgacgccatacggtttcagactgcggctgaacaccaccaactgcgcagtaaaccattaccgcaccatcgagaacacgcatggaacgttctacttcgattgtgaagtcaacgtgccccggggtgtcgatgatgttgatgcgatgcggctcatactgcttagccataccagaccagaatgcagtagtcgcagcggaagtgatggtaataccacgttcctgctcctgctccatccagtccatggttgcagcgccgtcatgaacttcaccgattttatggtttacaccggtgtagaacagaatacgttcggtagtagtggttttaccggcgtcgatgtgcgcactgataccgatgttacggtagcgtgcgatgggtgttgtacgagccatttgtttcctcgtttatcttttaggcgttcaatttaagtagcccaaagcgggctgcttactggaagcgcccgcctggtgactaaaactccgaagggataaccaacggtagtgtgcgaacgccttgttggcttcggccatacggtgaacgtcttcacgtttcttaactgcagtacctttgttttctgcagcatcagaaagttcgttcgccaggcgcagagccatggatttatcaccgcgtttacgagcagcttcaacgatccaacgcattgccagagcattacgacgaaccggacggacttcaactggtacctgataagtagaaccaccaacgcggcgagacttaacttctacagtcgggcgcacgttttcgagagctacttcgaatgcttccagttcagatttaccagagcgctgagccagggtctccagcgcgctgtatacgatagattcagcagtagattttttaccatctaccatcaggatatttacaaatttagccagcagttcacttccgaacttcggatccggcagaattttacgctgaccaatgacgcgacgacgtggcatggaaatactccgttgttaattcaggattgtccaaaactctacgagtttagtttgacatttaagttaaaacgtttggccttacttaacggagaaccattaagccttaggacgcttcacgccatacttggaacgagcctgcttacggtctttaacgccggagcagtcaagcgcaccacgtacggtgtggtaacgaacacccgggaggtctttaacacgaccgccacggatcaggatcacggagtgctcctgcaggttgtgaccttcaccaccgatgtaggaagtcacttcgaaaccgttagtcagacgaacacggcatactttacgcagcgcggagttcggtttacgaggagtggtagtatatacacgagtacatacgccacgtttttgcgggcatgcttccagcgcaggcacgttgcttttcgcaactttgcgagcacgtggtttgcgtaccagctggttaactgttgccattaaatagctcctggttttagcttttgcttcgtaaacacgtaataaaacgtcctcacacaatatgaggacgccgaattttagggcgatgccgaaaaggtgtcaagaaatatacaacgatcccgccatcaccaggccatctggctggggtgcttaaccgtaagtctgacgaaatcagtatagtcaatgagaatgatgtcgttgctaatttgaccagtcaaaccgcgggcaataaggtcttcgttcagggcatagaccttaatgggggcattacgcagactttcaaggtagcggttaccgtcaactgcggcagttacgccatcttgcaataatagcagttcgtctccttcactgagcagacgcagcagcgcagcaaaatccgtcagccagggactgcgatgtaatgtgtgcagcataaacgcctcaaaacctcaaaataacatcgtagttggcgagttcgcggcgtaaggcatctgcttcgagcggcgtggcttcgacaacaaagggtgtctgcggatctaacccgcgttcgcgcagactagccgcacaaacccagcactgttcaatgtcgtacagacccaacaatttaaaagtggcaatgtaatcacgcgccagcactgcatcgggcttttgtcctggcagcagctgaaaaacgccatcagctataaagaagacagccagatcgtcagttaatgcggaagttgccagtaaagcatctaaaccttcccggcctgcggctgtaccatgaggtgcagtagaaaaaacaaacgcaattcgtttcatcagaactgtaccaccctgtcacaggtcaggctggcttccgccagcgccccaagtccgcttaaggtaaatccctgctgaaggttactgctagccagccccagtcttccggcctccgtttcatcaacaacgccacggcgtaatgctgccgctacgcagatattcagcgccacaccatgttgcgcattcagttgttgccaggcccgtacgaggtcaaattcgtcacttgccggagaggtcaattggttagcgttatagaccccttcccgatagaaaaagacgctgcttaactcatggccatctgctatcagcgcctgcgcaaactgaaaagcactactcgcctgttgcgtaccgtatgctggcccggtcaccacgatggcaaaacgcattacttatcttgcccctggaaatcaccgctcttgaactggcggatgtagagatagacagtgtgtttggagatgttcaggcggtcagcaacctggttgatcgcatctttaatatcgaagatccctttctcgtagagattcagcacgatctgacgatttttggcgttattagaaacattgcgatcggcattcacttcttcgatggtgaactccagcgtttgggtaaccagatcttcaacagaagaggcaaagttgacgctactaccgacatccggggtttctggcggcacaaaggtgctcataatctggctgaagggaacatcaagattcatattgatgcacagcagaccaattacacgctgttcgcggttacgaatcgcgatagtcagggacttcattaatacgccgcttttggcgcgagtaaagtagcatttagaaacgctgctatccgctcccgtcatatcgtgcagcatacgtagcgccaggtcagtaattgggctaccaatcttccggcctgtatgttcaccgttagcaatgcgaatggcactacattttagatcctgcaaagagtgcaaaacgatttcacagtgggagccaataagcatcgctaacccgtccaccaccgcttcgtaggatttcagaatatcaaaatcggtctggtcgaaaggacgttgatccagtaaatccaactcactggtttcgttggttaaaaggctcctggacatgaaaaaaaacactccttttcaggagcctgtcgttaacttttcagggcaggctcattaatgatgcgggtaactaaattaatacagcggaggttccgctttccagcactaattatatccggcctgtaataaaaaaaccgccgcctggtcaggcggcggttcttaatgcttattttttagcagaatctgcggctttcgcatcagcttccggctttgcatcagccttcggcgctggtttcacatccagcagctctacgtcaaacaccagggtagaattcggtgggatccccggaacacccgctttgccgtaagccagttctggtggaataaccagtttgatcttaccgcctttcttgatgttcttcagaccttctgtccaacccgggataacaccgtccagacggaaagaaagcggttcaccacgggtgtaagagttgtcgaactctttaccgtcgatcagcgtacctttgtagttcactacaacagtatcgctgtctttcggtgcttcgcctttaccggcttctactacctgataaaccagaccagtactagaggttttcacacctttctctttggcaaatttctcgcggtactctttaccttttgcttcgttatcagccgcgtctttttccatcttcgcctgagcagaagacttcacgcgagcttcgaatgcttgtagagtctgttcgatctcttggtcggagagtttgcttttatcagcaaatgcatcctgaacaccagcgatcagctgatctttatccagtttgatgcccagtttttcttgttcttttagagagttttccatgtaacgacccaggctggcacccagtgcataagcacttttctgatcgtcatttttgaacgctgctttgctgtcagcagctgtagcaggttttgcagcttcagcagcaaaagtgattggtgcatgcagggcaacggccattgtggtcgccagcagcgttactttaaacagacttttcatccatatctccaggatcggggcatctcaccccagggttaactattatcagaagggtactataaagcgttgtcgaacaaatctacatacagacacgccctattatcatctattttcagactctttttgtttaaattagtttcgatgaccgcgaaatgagtgctgtctcgggcagcaaagttaagtagaatccgcggcgaccattcgacaaaagaggtgaatcatgcaggatttaagtttggaagcacgcctggcagagctggagagccgactggcttttcaggaaatcaccattgaagaactgaacgtcacggtgaccgctcatgaaatggagatggcgaaactgcgcgatcatctgcgtctgctgaccgagaagttaaaagccagccagccgagcaacatcgcgagccaggctgaagaaacgccaccgccacattattgaggcgtaaaaaaagcggggattccccgcttttttgtcactttttcggtattagtggcaaccgcaaccgccgttgcctttaccgccacagcagccttcgccaccgtgttcatgaccgtgatcgtggccatgaccgccgcagcaaccgtcgtggtcgtgatcgtggtggtgatcgtgcgcgccgtgaacgtgaccatgagccagttcttcttcagtcgcttcgcgaatcgccacaacttcaacgttgaatttcaggttctgaccggccagcatgtggttaccatcaaccacgacgtgatcgtcttcaaccgcagtgatttcaaccggtaccggaccctggtcggtttcagccaggaaacgcatacctacctgcagttcatcaacgcccataaatacgtctttaggaacacgttgcaccaggttttcgtcgtactgaccgtaagcgtcgttcgcgccaacagcgacatcaaatttgtcgccaacttcatgaccttccagcgccgtttccaggccagagatcagggaaccgtgaccatgcaggtagtccagcggcgcactcaccggagactcatcaaccaacacaccgtcttctgtacgtacctgataggccaggctgaccaccaggtcttttgctactttcatgatatctcctgagcatgggaagaatagtggcgcagattgtagcggaattctgcagccgtgtactcactagcttaaaaaaactcggcgcatatcgttagtccggatgaaaaatcccgatcacttgctcatctttgcgaacgtgatcgcgggcttctttgtctgcttctcgcatctgatgtccgcacttaacacattcaacaatatcaatattattttcgcgccacatcgccatactatcctgcgcctgacaggccgggcattttgcgcccgcaataaaacgttttcggattgccatctttaccctttactcaaattcatcccagccgtccagctggcgtcgttcttgttgcatttcacgctggaaaatctcttccagttcgcgtcgggcttccctggcgcgagaaatttgtacggtatcggcatgcattgggatgagctctcgcagcatccgcatatccaggcggcgaaaatgcagttgcgctcgctgtgcctgatgcggatgcatgccaagcgtgaccagcgtcttgcgccccagctctaacgcactggagaatgtttcacgggaaaactgcgtcacccctgcctgtaataactcatgcgcttccacacgtccgcgcgctcgcgcaagaatatgcaaatgcggaaagtgctgttggcatatttccaccagcttcatggtgtcttccggctcgttacaggtaatgacgatagactcagcggcctctgcacccgcagaacgtaaaagatcgacctgcgtggcgtcgccgtaataaactttgtagccgtatttacgcatcaggttaacggcgctgatatcccgctccagcacggtaatgcgcattttatttgccatcagcaaacgaccaatcacctgaccaaaacgcccgaagcccacgacaatgacctggggtttatcatcgttgacccacggtttttcgtcttcttcttccggtccgttaaactggcgggatagccatttatccaccagcttcatcagcaacggcgtggtcatcatggaaagcgtcaccgtcaccagcaacaacgccatctggtcgccctggaataagcgttgactagaagcggtagaaaagaggacaaaggcaaactcaccactctgactcaacacgccagcaaactgcatccgctcactgctacgcacgccatacaatcgcgccagcagatacagcacgagaattttcaccgccaccagcacaaccacgcttatcactacccacaacagatgggtataaagcaccccgaggttgagactcatgccgacagagataaagaacaaaccgagcagcaagcctttgaagggatcgatagccgtttccagttcatggcgatattcactttccgccagcagcacgcccgcaataaatgtaccgagcgccatgctcagccccagcgcatccataaacaatgcggaacccaacaccagcagcagcgtcgcggcggtgaacacttcccgcacgccagaagctgcaataaagcggaataccggacgcagtaaatagcgcccaccaatcagcatgccgacaaacgccagcaccttcatgccgaccttcatccagtcgaaatgttcgtctgcgctccccgccaacaacggcactaacgccagtgctgggattactgccagatcctgaaacagcagaacgctaaacccgagctggccggattcgctgcgattcatccctttctcacgcatcaattgcaacgccattgcagtactagacatcgcaaggccaatgccaccgaccaccgccgcctgccaggcgaaatccgtcagcatcaataatcccgccagcaacgccgcgcttaacagcacctgtgccgcgcctacgccaaaaatgctacgccgcagttgccaaagtttggagggattcaactcaaggccgatgataaacatcaggaataccacgccgagttcgctaaagtggaggatctcatcgacgtcgctaataaaccccagcccccacgggccaattgcaatccctgccagcaaatatcccaacacagcgccaatacccagccggcttgccagcggcaccgcagccaccgccgcgaagagaaacagcactcctgcgagtaaaaaatcggaaccttccatcagcggcctcctggagacagcggatttgccagccagtcaccgtaggctctggcgtggctcgccagctcctgtgcgctttgccgtctcgcccagtaaataatgatgggacttaaccaatgcatccggcacatgcccgccgccagttcaaaggggcgcagcacatcgctcatcgggtagcgattcagcgcgtcataacggtaagcactttccggctcgccggtggtaatcacgctacgccagtactttcccgccagttggtttcctcccggcccgctggcaaaaccacgacttaatacccggtccagccactctttcagtagcgccgggcagctataggtataaagaggatgctgaaagacaatcacctcgtgctcgcgcagtaatgcctgctcacgggggatatcaataaaaaaatcgggatagtgcgcgtaaaggtcgtgcacggtaacattgctgagctgcgtggccggtttaagcagtacccggtttgccacgctgtcctgagattccggatgggcatacagcagcaaaactttcgctggctgagacatcatccccctcccggtatggtttttgtgtatagtcgctgttttgggctaccattgcgcccggtgcggcagctcgcccatacattacattatcataatgataagttaacatagtctgaacatacggcaccttatgattgttttctccagcttacaaattcgtcgcggcgtgcgcgtcctgctggataatgccaccgccaccatcaaccctgggcagaaagtcggcctggtgggtaaaaacggctgtggtaaatctaccctgctggcattgctgaaaaatgaaatcagcgccgacggcggcagctacacctttccgggaagctggcaactggcgtgggtgaatcaggaaacgccggcgttaccgcaagcggcgctggaatatgtcattgacggcgaccgtgaatatcgtcaactagaagcgcagctacacgacgccaacgaacgtaacgacgggcacgccattgcgaccattcatggcaagctggatgctattgacgcatggagtattcgctcccgtgctgccagcctgctgcacggcctcggtttcagcaatgaacaactggagcgcccggtaagtgatttttccgggggctggcgtatgcgtcttaaccttgcccaggcgctgatttgccgtagtgacttgctgctgctcgacgaaccgactaaccacctcgatctcgatgccgttatctggctggaaaaatggctgaagagctatcagggcacgctgatcctgatctctcacgaccgcgacttcctcgatccgatcgtcgataaaattattcatatcgaacaacaaagcatgttcgagtacaccggcaactacagtagctttgaagtacagcgcgccacccgtctggcgcagcaacaagcgatgtacgaaagccagcaggaacgcgtagcgcatctgcaaagttatatcgaccgtttccgtgccaaagccaccaaagcgaagcaggcccagagccgcattaagatgctcgagcgtatggagctaattgcccccgcgcacgtcgacaacccgttccgctttagcttccgcgcgccggaaagcctgccaaatccgttactgaagatggaaaaagtcagcgcgggctatggcgatcgcattattctcgacagcattaaactgaacctggtgcccggcagccgtattggtctgttaggccgcaatggcgcgggtaaaagcacattaatcaaactgttagccggtgaacttgcgccagtcagcggtgaaattggtctggcgaaagggatcaaactcggctacttcgcccagcatcaacttgaatacctgcgcgccgacgaaagtcctattcaacatctggcacgtttagcgccgcaggagctggaacaaaaactgcgtgactacctcggcggctttggtttccagggcgataaagtaaccgaagaaacgcgccgcttctccggtggggaaaaagcccgcctggtgctggcattaattgtctggcagcggccgaatctgctgctgctcgacgaaccgactaaccaccttgacctcgacatgcgtcaggcactcaccgaagcattaatcgagtttgaaggcgcgctggttgtcgttagccacgaccgtcatttgctgcgttccaccactgacgatctctacctggttcacgatcgtaaagtcgaaccgttcgacggcgatctggaagattatcaacagtggttgagcgacgtacaaaagcaggaaaaccagaccgacgaagcgccaaaagagaatgcgaacagcgcccaggcacgtaaagatcagaagcgtcgggaagctgagctgcgtgcgcaaacccagccactgcgtaaagagattgcccgtctggaaaaagagatggagaagctgaacgcgcaactggcgcaggcggaagagaaactcggcgacagcgaactgtatgaccagagccgtaaagcggagttgaccgcctgcctgcaacagcaagccagcgccaaatccggcctggaagagtgcgaaatggcatggctggaagcccaggagcagcttgagcagatgctgctggaaggccaaagcaactgatggcgcagataacgacgaccgatgccaatgaattcagcagcagtgctgaattcatccccatgcgcggctttagcaattgtcatctgcaaaccatgctgccgcgtctgtttcgtcgtcaggtgaaattcaccccgtactggcagcggctggagttgcccgacggcgattttgtcgatcttgcgtggagtgaaaaccctgcacaggcgcaacataaacctcgtctggtggtgtttcacgggctggaaggcagtctcaacagcccttacgcccacggtctggttgaggcggcgcaaaagcgcggctggctgggcgtggtgatgcattttcgcggatgcagcggtgaaccaaaccgtatgcaccgcatttaccatagcggcgaaaccgaagacgccagttggtttttacgctggctgcaacgcgaatttggtcatgcgccaacggctgccgtcggctatagcctcggcggtaatatgctggcctgtttgctggcaaaggaaggcaatgatctcccggttgatgcggcggtgattgtctctgcgccgtttatgctggaagcctgtagctatcatatggaaaagggcttttcccgcgtttatcagcgttacttgctgaacctgttaaaagccaatgccgcgcgcaagctggcagcctaccccggaacgctgccgattaatctcgcgcagttaaaaagcgtacgtcgcatccgtgaatttgacgatctcatcaccgccagaattcacggctacgccgacgctatcgactattatcgtcagtgtagcgccatgccgatgctgaaccggatcgccaaaccgacgctgattattcacgccaaagacgatccgtttatggatcatcaggtgatcccgaaaccggaaagtctccccccgcaggtggagtatcaactgactgaacatggcggtcatgttggctttattggcggtacattacttcatccgcaaatgtggctggagagtcgcattcctgactggttaacaacgtatctggaggcgaaaagttgttgatattaacgtatctggaggcgaaatcatgttgattccgtggcaagacctctcccccgaaacgctggaaaatttaattgaaagctttgtgttacgtgaaggcaccgattatggtgaacatgagcgtacacttgaacagaaagtcgccgacgtcaaacgccagctacagtgcggagaagcggtgctggtatggagcgagctgcacgaaacggtcaatattatgccgcgcagtcagtttcgcgaataacctgcaaccgtcggcggacgagataataatgatagctaagtcatggagttactatgtctgccaaacatccggtcattgcggtaacaggatccagcggcgcggggaccaccaccaccagcctcgcgtttcgtaaaatattcgcgcagttaaatctgcatgcagctgaggtggaaggcgacagttttcaccgttacacccgcccggaaatggacatggcgatccgcaaagcgcgcgacgccgggcggcatatcagctacttcggccccgaggctaacgacttcggcctgctggaacaaaccttcattgaatacggtcagagcggcaaagggaaatctcgcaaatatctgcatacctacgacgaagccgtaccgtggaatcaggtaccggggacattcaccccctggcaacctttaccggaacccactgatgtactgttttatgaaggtttacacggcggcgtagtcacgccacagcataacgttgcgcagcatgtggacttactggtcggcgtggtgcctatcgttaaccttgagtggattcaaaaactgatccgcgacaccagcgagcgcgggcacagtcgagaagcagtgatggacagtgtagtgcgtagtatggaagactatatcaactacatcacaccgcagttttcccgcacccatcttaacttccagcgcgttcccaccgtcgacactagtaacccgttcgcggcaaaaggtatcccgagcctcgatgaaagctttgtggtgatccattttcgtaatctggaagggatcgatttcccctggctgctggcgatgttgcaaggcagtttcatttcccacatcaatacgttagtggtaccgggcggcaaaatgggtctggcaatggaattaattatgctgccgctggtgcaacgattgatggaaggaaagaaaatcgagtaactctgctattacgccggataaaatactatccggcttcacaacgggatagttaagtcacgcggcaaccacttcatagctgtgagtaatattcaccgctttttccagcatcaacgccacactacaatatttctcggcagagagatcaaccgcacgcgcaaccgctgcgtctttcaggtcgcgaccggtgacgataaaatgcagattaatgtgcgtaaacaggcgtggtgcctcttcgcggcgttcagaggtcaattttacttcacaatcgaccacatcctgacgccctttttgcaggatgctaaccacatcgatggcactgcaaccacccgccgccatcaacaccatttccatcggacttggtgctttatcgccactgttgccgtccattaaaatctgatgaccagaggcggattcgcccagaaaagttaacccttcgacccacttcactcgcgcttgcatttttgctactccactgcgtcaattttcctgacagagtacgcgtactaaccaaatcgcgcaacggaaggcgacctgggtcatgctgaagcgagacaccaggagacacaaagcgaaagctatgctaaaacagtcaggatgctacagtaatacattgatgtactgcatgtatgcaaaggacgtcacattaccgtgcagtacagttgatagccccttcccaggtagcgggaagcatatttcggcaatccagagacagcggcgttatctggctctggagaaagcttataacagaggataaccgcgcatggtgcttggcaaaccgcaaacagacccgactctcgaatggttcttgtctcattgccacattcataagtacccatccaagagcacgcttattcaccagggtgaaaaagcggaaacgctgtactacatcgttaaaggctctgtggcagtgctgatcaaagacgaagagggtaaagaaatgatcctctcctatctgaatcagggtgattttattggcgaactgggcctgtttgaagagggccaggaacgtagcgcatgggtacgtgcgaaaaccgcctgtgaagtggctgaaattagctacaaaaaatttcgccaattgattcaggtaaacccggacattctgatgcgtttgtctgcacagatggcgcgtcgtctgcaagtcactagtgagaaagtgggcaacctggcgttcctcgacgtgacgggccgcattgcacagactctgctgaatctggcaaaacaaccagacgctatgactcacccggacggtatgcaaatcaaaattacccgtcaggaaattggtcagattgtcggctgttctcgtgaaaccgtgggacgcattctgaagatgctggaagatcagaacctgatctccgcacacggtaaaaccatcgtcgtttacggcactcgttaatcccgtcggagtggcgcgttacctggtagcgcgccattttgtttcccccgatgtggcgcagactgatttatcaccccgatatcaactatgcacttcgacaaacgctggtgctatgtttgcccgtggccgttgggttaatgcttggcgaattacgattcggtctgctcttctccctcgttcctgcctgttgcaatattgcgggccttgatacgcctcataaacgttttttcaaacgcttaatcattggtgcgagcctgtttgccacctgtagcttgctgacacagctactactggcaaaagatgttcccctgccctttttgctgaccggattaacgctggtacttggcgtcactgctgagctggggccattgcacgcaaaattgcttcctgcaagcctgctcgccgccatttttaccctcagtttggcgggatacatgccggtctgggaaccgttgctcatctatgcgttgggcactctctggtacggattgtttaactggttttggttctggatctggcgcgaacaaccgctgcgcgagagtctaagtctgctgtaccgtgaactggcagattattgtgaagccaaatacagcctgcttacccagcacaccgaccctgaaaaagcgctgccgccgctgctggtgcgccagcaaaaagcggtcgatctaattacccagtgctatcagcaaatgcatatgctttccgcgcaaaataatactgactacaagcggatgctgcgtattttccaggaggcgctggatttacaggaacatattagcgtcagtttgcatcagccggaagaggtgcaaaagctggtcgagcgtagccatgcggaagaagttatccgctggaatgcgcaaaccgtcgccgctcgcctgcgcgtgctggctgatgacattctttaccatcgcctgccaacgcgttttacgatggaaaagcaaattggcgcactggaaaaaatcgcccgccagcatccggataatccggttgggcaattctgctactggcatttcagccgcatcgcccgcgtgctgcgcacccaaaaaccgctctatgcccgtgacttactggccgataaacagcggcgaatgccattacttccggcgctgaaaagttatctgagtctaaagtctccggcgctacgcaatgccggacgactcagtgtgatgttaagcgttgccagcctgatgggcaccgcgctgcatctgccgaagagctactggatcctgatgacggtattgctggtgacacaaaatggctatggcgcaacccgtctgaggattgtgaatcgctccgtgggaaccgtggtcgggttaatcattgcgggcgtggcgctgcactttaaaattcccgaaggttacaccctgacgttgatgctgattaccaccctcgccagctacctgatattgcgcaaaaactacggctgggcgacggtcggttttactattaccgcagtgtataccctgcaactattgtggttgaacggcgagcaatacatccttccgcgtcttatcgataccattattggttgtttaattgctttcggcggtactgtctggctgtggccgcagtggcagagcgggttattgcgtaaaaacgcccatgatgctttagaagcctatcaggaagcgattcgcttgattcttagcgaggatccgcaacctacgccactggcctggcagcgaatgcgggtaaatcaggcacataacactctgtataacagtttgaatcaggcgatgcaggaaccggcgtttaacagccattatctggcagatatgaaactgtgggtaacgcacagccagtttattgttgagcatattaatgccatgaccacgctggcgcgggaacaccgggcattgccacctgaactggcacaagagtatttacagtcttgtgaaatcgccattcagcgttgtcagcagcgactggagtatgacgaaccgggtagttctggcgatgccaatatcatggatgcgccggagatgcagccgcacgaaggcgcggcaggtacgctggagcagcatttacagcgggttattggtcatctgaacaccatgcacaccattagcagcatggcatggcgtcagcgaccgcatcacgggatttggctgagtcgcaagttgcgggatagcaaggcgtaatgcaggctaaaccatcggataaggcattcacgccgcatccgacatcttttgcctgatgcttcgtatttacgccccaaccaccttcgccaccgcgtgggcgaaacgttgcatcccttcatcgatatccgcatcttccaccaccaggctcggtgcaaaacgcatcacatccggtccggcattcagcaccattacgccagcctctgcgcccgcatacaggaaatcacgcgcccgacctttgtactgtggtttcagctctgcgccaatcaacagccccataccgcgaatatcgctaaatacatcgtactgctgatcgatcttctgcagatggtcaacaaaacgctggcgtttcgcctgaatgccttccagcacttcaggggtattgatgatatcaaacgccgcccccgctactgcacaggccagaggattaccgccgtaggtggaaccgtgagaaccaggatgaaacgcagaagcaatttccgccgtggtcagcatggcgctaatcgggaagccgccgcctaacgctttcgcagaggtcagaatatccggcgtaacgccgtagtgcatgtaagcaaacaaatcgccggtccgccccatcccgcactgcacttcatcaaacaccaataatgcctgatgttgatcgcacagctcgcgcaagccctgcaaaaactctggcgtcgctgccgtcacaccgccctcgccctggatcggctcaaccaccaccgcacaggtgtgatcatccatcaccgctttcactgcatggagatcgttaaagggaacgtggatgatgtctgccggtttcggcccaaagccgtcggaatattttggctgcccacccacgctaacggtaaacaggctgcgaccatgaaaagcgttatggaaggcaataattttggttttgaacgggctatgacgcacacaggcgtaatggcgtgccagtttaaaggcggtttcgttagcttccgtgccggagttcataaacaccacgcgttcggcaaacgttgcctcaatcagtttacgcccaagacgcagcgccggttcattggtgaaaacgttactgatatgccacagagtttcgccctgggtttttaacgcgttcaccagcgcaggatggcaatggcccaacgccgtaactgcaatgccacccgcgaaatcgacatactccttgccttgctgatcccagattcggctgccctgaccttttaccggaataaactctgccggagcataaatcggcaggatcacttcatcgaaagtcgcgcgtgtaattgctgtttgttcaattgccatctcatgatcaccctgttacgcataaacaaatgtgaaattataaccacaaaatatgcataaaaaatcactaaatggcaatcagaaatcagcgatgcaggaaattagccagcagttgatgtccttgttcgctaagaatactttctggatggaactgcacaccttccagatcccactggcgatggcgaatccccataatctctcgggtttcgctccaggccgtcacgtcaaagcacgctggtaaactgtcaggttccaccaccaggctatggtagcgtgtcacggtaagtggatttgccagcccccgaaatacgccctcaccgttatgtgtaatcgggctggttttgccgtgcatgacctttgcggcgcgcacaactttaccgccaaatgcctgcgccattgcctgatgaccgaggcagacgccaagaatcggcaagcgcccggcatagtggcgaataacgtcaagggagatcccggcttcatctggcgtacaggggccaggactgatgacaattttttgtggtttaagggcgtcgatatccgccagcgtcaacgcatcgttgcgcttaaccagcacatccgcccccagttcacaaaagtactggtagaggttccaggtaaaagaatcgtagttatctataagcaggatcatggcggctccggtacaaaagaaccgcgctattttactcagattccccggcttcgcttaccactttgctaaatatcatctgcagtgcggtgagatcccccattgccccactctgatttgcctgattccaggcctctttttcgataccctgccagctcagttgatatccggcatgaatcgccagttgctcgaagaagatccgctgtgccagaccacttcccacccggaagggatgcagcacgttgatttcacaatagtaatgcgccagccgctcgacgaacttcgctttctccaggccaaccagataaccttcttcctccagatcctgcatcagggcattgccctctttttcgatataagcaaagtggcagaacggcgtatcaccctgataaatatcaacttcacgcagttgccctgcccagtcgaaaatatcctgatacagctggcgatggatagttcgcaaatgcggtaaaccgcgcaccagcggaccaagctcaatggtcgcagcacgcagcgccgtcatttcgtaagcggcctgttccagccgctgctgctggcggatgttcagccggttacgcatgatatcaaggcctggataaagatacggatcgcgcccttcgccgaatttatcgctcatagtgactcctcagctcttcaaggcgcgctaaagcctctgcggcagtaagagtgactaaaggcatctcgacgccttcaagacggcgactggcctgaaaattacgattacgctgaagctcccagagacgggacttttgcttatcggtgagtttcttcacttgatgcctccctgaacgtgtccatttgccacaagtataagcggcaaatccgggttacgccgggagagcagaagcgcgggcaagattgcccgcgcgagaaatcattacggcaggactttagcggaaaggataactaccggtttactcggcacattctggtacggaccaacgtcatgagtcggcacctgggaaatcttatcggcaacgtccatgcctttcaccactttaccaaataccgcgtaaccgaaatcacgctgaccatggtcaaggaaggcgttatcggcaacgttgataaagaactggctggtggcgctgtctttgtcagcggtacgtgccatcgcgatggtgccacgcgtgttgcgcaggccgttatcggcttcatttttgattggcgggtttggttttttctgctgcatctgctcggtgaaaccgccgccctgaatcataaagccaggaatgacgcggtgaaaggtagtgttgttataaaaaccgctgttcacataatcgacaaagttttgcacagacactggcgctttttgtttatccagctccagttcgatgttaccagcactggttgtcaacaatacgtgcgggtcccctttcgctgccattgctgcgggagaaagagcagaaagagcgaaaacagcagccatcgccgccagggtgcttttgaacatgagatttccttaacaaacagagcagaaaaaaagcaagtgaagagattctaaatagccttcaagaacaaggccatccctttacctaattttacgtatctgaaatatatgtaacctgacgatcactttttattccgtgatcaaaatcacctcttaaaatgcaatttagcaaccgattgcaataaaacatttaaacagatcacaaaatcacctaaaatcgcccgctcgcggcatatcccgctatgccattttatttttgaacgcaggccaatcatgactaacagcaatcgcatcaagctcacatggattagctttctctcctacgcactgactggtgcgttggttattgtcaccgggatggtgatgggaaatatcgccgattatttcaatctgcctgtttccagtatgagtaataccttcaccttcctcaacgccggcattttaatctctatcttcctcaacgcctggctgatggaaatcgtcccgttgaaaacgcagttacgttttggctttctcctgatggtgctggcggttgccggtttgatgttcagccacagcctggcgctgttcagcgcggcgatgttcattctcggggtggtcagcggcatcaccatgagcattggtacattcctggtaacacaaatgtatgaagggcgtcagcgcggttcccgcctgttatttaccgactccttcttcagtatggctgggatgattttcccaatgatcgccgcgtttctactggcgcgcagcattgagtggtactgggtttatgcctgcatcgggctggtgtatgtcgctatttttattctgaccttcggctgtgagttcccggcgctgggcaaacatgcgccaaaaacggatgctccggtagagaaagaaaagtgggggatcggcgtactgtttctctctgttgcggcgttgtgctacatcctcggtcagttaggttttatctcctgggtgcctgagtatgccaaaggcctgggcatgagcctgaacgacgcgggcacgctggtgagtaacttctggatgagttacatggtcggcatgtgggcgttcagctttattcttcgcttctttgatttgcaacgcattctgaccgtactggctggtctggctgcgattctgatgtacgtctttaacaccggaacaccagcacatatggcgtggagtattctcgctctgggcttcttctccagcgcgatctataccaccatcatcaccctgggtagtcagcagaccaaagtaccgagcccaaaactggttaactttgtcctgacctgcggaaccatcggtactatgttgacctttgtggttaccggcccgatcgttgaacatagcggtccgcaggcggcactgcttacagcaaacggtctgtacgctgtcgtctttgtgatgtgcttcctgttaggtttcgtcagccgtcaccgtcagcataacaccctgacctctcattaattgctcatgccggacggcactatcgtcgtccggccttttcctctcttcccccgctacgtgcatctatttctataaacccgctcattttgtctattttttgcacaaacatgaaatatcagacaattccgtgacttaagaaaatttatacaaatcagcaatatacccattaaggagtatataaaggtgaatttgatttacatcaataagcggggttgctgaatcgttaaggtaggcggtaatagaaaagaaatcgaggcaaaaatgagcaaagtcagactcgcaattatcggtaacggtatggtcggccatcgctttatcgaagatcttcttgataaatctgatgcggccaactttgatattaccgttttctgtgaagaaccgcgcatcgcttatgaccgcgtacacctcagctcttacttctctcaccacaccgccgaagagctgagcctggtgcgcgaaggcttctacgagaaacacggcatcaaagttctggtcggcgaacgcgctatcaccatcaaccgtcaggagaaggtgattcactccagcgccggacgtaccgttttttatgacaagctgatcatggcaaccggttcctacccgtggatcccgccaatcaaaggttctgatactcaggactgctttgtctatcgcactattgaagacctcaacgccattgaatcctgcgcccgtcgcagcaaacgcggtgccgttgttggtggcggcctgttaggtctggaagccgcaggcgcgctgaaaaacttaggtattgaaacccacgttatcgaatttgcccctatgctgatggcagaacagcttgatcagatgggcggcgagcagctgcgtcgcaaaatcgaaagtatgggcgtgcgcgttcacaccagcaaaaacacccttgagattgtgcaggaaggtgttgaagcgcgtaaaaccatgcgttttgccgacggcagcgaactggaagtcgactttatcgtcttctctaccggtatccgtccgcgcgataagctggcaacccagtgtggtctggacgttgctccgcgtgggggtattgtcattaatgattcctgccagacttccgatccggatatctacgccatcggtgaatgcgcaagctggaacaaccgtgtatttggtctggtagcacctggctacaaaatggcgcaggtcgccgttgaccatattctcggtagcgaaaacgcctttgaaggtgctgaccttagcgccaagctgaaactgctgggcgtagacgtaggcggtattggtgatgcgcacggtcgcacgcctggcgcacgtagctacgtttacctcgacgaaagtaaagagatctacaaacgcctgattgtcagcgaagacaacaaaaccctgctcggtgcggtactggtgggcgataccagcgactacggtaacctgctgcaactggtgctgaacgctatcgaactgccggaaaacccggattccctgatcctgccagcacacagcggtagcggcaagccgtctatcggtgttgataaactgccggacagcgcgcaaatctgctcctgcttcgacgtcaccaaaggtgatctgattgctgccatcaacaaaggctgccacacagttgcggcgctgaaagctgaaaccaaagcgggtactggctgcggtggctgtatcccgctggtcactcaggtactgaacgcggaactggcgaaacagggcatcgaagttaacaacaacctgtgcgaacactttgcttatagccgtcaggaactgttccatttgatccgcgttgaaggcattaaaaccttcgaagaactgctggcgaaacacggcaaaggctacggttgtgaagtttgtaaaccaaccgtcggtagcctgctggcctcctgctggaacgaatacattctgaagccggaacatactccgctgcaggattctaacgacaacttcctcgctaacatccagaaagacggcacctacagcgtgatcccgcgttctccgggcggtgaaatcaccccggaagggctgatggcggtaggtcgtatcgcgcgtgaatttaatctctacaccaagatcactggctcccagcgtctggcgatgtttggcgcacagaaagacgatctgccggagatctggcgtcagctgattgaagccggcttcgaaaccggtcatgcctatgcgaaagcactgcgtatggcgaaaacctgcgtgggtagcacctggtgccgctacggcgttggcgacagcgtcggcctcggcgtggaactggaaaaccgctacaaaggcatccgtacgccgcacaaaatgaagttcggtgtctccggctgtacccgtgaatgtagtgaagctcagggtaaagacgtgggtattatcgccactgaaaaaggctggaacctgtatgtttgcggtaacggcggcatgaaaccgcgtcatgcggatctgctggcggcggatatcgatcgcgaaacgctgatcaaatatctcgaccgcttcatgatgttctacatccgtactgccgacaaactgacgcgtaccgcaccgtggttagaaaacctcgaaggcggcatcgattacctgaaagcagtgatcattgacgacaaactggggctgaacgcacatctggaagaagagatggcgcgcctgcgtgaagcggtactgtgtgagtggactgaaacggtcaatacgccgtctgcgcagactcgcttcaaacacttcatcaacagcgacaagcgtgacccgaacgtgcagatggtgccagagcgcgaacagcaccgtccggcaacgccgtatgaacgtatcccagtaactctggtggaggacaacgcatgagccagtggaaagacatctgcaaaatcgatgacatcctgcctgaaaccggcgtctgcgcgctgttaggtgacgagcaggtcgcgattttccgcccgtatcacagcgatcaggtgtttgcgatcagcaacatcgacccgttcttcgagtccagcgtgctgagtcgcggactgattgcggaacaccagggcgagctgtgggtcgccagcccgctgaaaaaacagcgttttcgcttaagcgacggcttgtgcatggaagacgaacagttttccgtcaaacattacgaagcgcgagtgaaagacggcgtggtgcagctgcgcggttaatgttttaacgggaggcgcaatgcctcccctttttgcatggtcctgtaataatcttcggtatattgcaggacattttttaaactttttgttttattttttgtttttattttttaaaggataatcaaatgtttacagacactattaataagtgtgcggctaacgctgcgcgcattgcacgcctgagcgcaaataacccgctcggcttttgggtcagctccgccatggcgggcgcgtatgtgggtcttgggatcatcctgattttcacgctcggtaatttgctcgatccatccgtacgccctttggtgatgggcgcgacctttggtatcgccttaacgctggtgattatcgccggttctgaactgttcaccggacacaccatgttcctcacctttggggtaaaagcgggcagcatcagccacgggcaaatgtgggcaatcctgccgcaaacctggctgggtaacctggtcggttccgtcttcgttgccatgctctatagctggggcggcggtagcctgctgccggtagataccagcatcgttcactccgtcgcgctggctaaaaccactgcaccggcaatggtactcttcttcaaaggtgcattgtgtaactggctggtttgcctggcaatctggatggcgctgcgcactgaaggggcggcgaaatttatcgctatctggtggtgtctgctggcatttatcgcgtccggctacgagcactctatcgctaacatgacgctgttcgcgctctcctggttcggcaaccacagcgaagcctacacgctggcgggtattggtcataacctgctgtgggtgacgctgggtaatactttaagtggtgccgtattcatgggattgggttattggtatgctacgccgaaagcgaatcgtccggttgcggacaaatttaatcaaactgaaacggctgccggttaattactaaggggtttttacgtggatcatttgcctatattttgccaattacgcgatcgcgactgtctgattgtcggcggtggtgatgtcgcggaacgcaaagcaaggttgctgttagacgcaggcgctcgcttaacggtgaatgcattagcgtttattccacagttcaccgcatgggcagatgcaggcatgttaaccctcgtcgaagggccatttgatgaaagccttctcgacacctgctggctggcgattgcagcgacggatgatgacgcgcttaaccagcgcgtcagcgaagccgctgaagctcgtcgcatcttctgtaacgtggtcgatgcgccgaaagccgccagctttattatgccgagcattattgaccgcagtccgctcatggtagcggtctcctctggcggcacctctccggttctgacacgcctgttgcgcgaaaaacttgaaagtctgctgccgttacatctgggccaggtagcgaaatacgccgggcaattacgcgggcgagtgaaacaacagttcgccacgatgggtgagcgtcgccgtttctgggagaaattgttcgttaacgaccgcctggcgcagagcctggcaaacaacgatcagaaagccattactgaaacgaccgaacagttaatcaacgaaccgctcgaccatcgcggtgaagtggtgctggttggtgcaggtccgggcgatgccgggctgctgacactgaaaggactgcaacaaattcagcaggcagatgtggtggtctacgaccgtctggtttctgacgatattatgaatctggtacgccgcgatgcggaccgtgttttcgtcggcaaacgcgcgggataccactgcgtaccccaggaagagattaaccagatcctgctgcgggaagcgcaaaaaggcaaacgcgtggtgcggctgaaaggtggcgatccgtttatttttggccgtggtggcgaagagctggaaacactgtgcaacgcgggtattccgttcagcgtggttccgggtattaccgcagcttctggttgctctgcctatagcggtattccactcacgcatcgcgattatgcccagagcgtacgcttaattaccggacacttaaaaaccggtggcgagctggactgggaaaacctggcggcagaaaaacagacgctggtgttctatatggggttgaatcaggccgcgactattcagcaaaagctgattgaacacggaatgccaggcgaaatgccggtggcaattgtcgaaaacggtacggcagtcacgcagcgcgtgattgacggtacgctcacacagctgggagaactggcgcagcaaatgaacagtccaagcctaattattattggtcgggttgttggcctgcgcgataaactgaactggttctccaaccattaatttaacccgggccagagaattctggccttcttaatgactctttttatatattcagcaaataaaacatagccccttaataaatattatctgctaatgggttatattcaccgttacagcgacttacaaaattaagtcattcgctcactgacgccaattaaatattcctgtatcgttcttaacgagcagtctgcttatattcatataatcaatgaatattaattaatatataatacatagggaatgtaaatgaacaaatttattaaagttgcactggtaggtgcagtactggctacgttaactgcatgtactggtcatattgaaaaccgtgataagaactgctcttacgactacctgctgcacccggcaatttctatttctaaaatcattggcggttgcggtcctactgcacagtaagtctctgacagaaatcggctaacaccggtttaattgcccgacgccctctggattttccgagggcgtatttgtttctatgtccttcttgcccccgcccgtaaaaatattttcactttaaattcaatttgataactacatccattagccacagcgcgatcctgtgcgaaattttgtgatcttcctccacattacataacatcatatgttgttatattcatcatgcattgtcatgttaccttttaaatgactgcaaactctcccctacaacgtattggacaagaaaaaggtatcgctatgggaagccaggaactccaacgcaagctcggattttgggccgttcttgcaatcgccgtcgggacaaccgtcggctccggtatttttgtatctgtgggtgaagtggcaaaagcagcgggcacgccgtggcttacggtgctcgcgtttgtcattggcgggttaattgtgatcccgcaaatgtgcgtctatgcggaactatccaccgcttatccggaaaatggcgcagattatgtttatctgaaaaatgccggaagccgaccgctggctttcctctccggctgggccagcttctgggccaacgatgcgccgagtttgagcattatggcgctggcgattgtcagcaatcttggctttttaacgcctatcgatccgttgctcggtaaatttatcgccgccggattaattatcgcctttatgttgctacacctgcgctccgttgaaggcggcgcagcgtttcagacgctaattaccatcgccaaaattatcccgttcactatcgtcattggccttgggatcttctggtttaaagcggagaattttgccgcccctaccaccactgcgattggcgcaacgggcagctttatggcgctgctggcggggatctctgccaccagttggagctataccggcatggcctctatctgttatatgaccggcgaaattaaaaaccccggaaaaaccatgccacgagcgctgattggttcctgtctgctggttctggtgctctacaccctgctggcgctggtgatttccggcctgatgcccttcgacaaactcgccaattctgaaacgccgatttccgacgccctgacctggatccccgcactcggcagcaccgctgggatctttgttgccatcacggcgatgatcgtcattcttggtagcctttccagctgcgtgatgtaccagccgcggctggaatacgcgatggcgaaagacaacctgttctttaaatgcttcggccatgtgcatccgaaatacaacacgccggatgtctccatcatcctgcaaggggcgctggggatcttcttcatcttcgtttccgatctcaccagcctgctgggttatttcaccctggtgatgtgtttcaaaaataccctcaccttcggctccatcatctggtgtcgtaaacgcgacgattacaaaccgctgtggcgtactccggctttcgggctgatgaccaccctcgccattgcgagtagcctcattctggtcgccagtacctttgtctgggcaccgattcccggccttatctgcgccgtcatcgttattgctactggtctgcctgcttacgccttctgggcgaagcgtagccgccagctcaacgctttgagctaatgttatctggagaaaataaaatgttggatattgataaaagcaccgtggactttctggtcaccgaaaatatggttcaggaagtggaaaaagttctcagccatgacgttccgctggtgcacgccatcgtggaagagatggtgaagcgcgacattgatcgtatttatttcgttgcctgcggaagcccactcaacgcggcgcaaacggcgaaacatctggcggatcgcttttccgatcttcaggtctacgccatttccggctgggagttctgcgataacaccccgtatcgcctcgacgatcgttgcgcagtaattggcgtttctgactacggtaaaaccgaagaggtaatcaaagcgctggagctgggccgggcctgcggcgcactcactgcggcgttcaccaaacgcgcggatagcccgattaccagcgcggcggaatttagcattgattatcaggccgactgtatctgggaaattcacctgccgctctgctacagcgtggtgctggagatgatcacccgcctcgcgccgaacgcggaaatcggcaagatcaaaaacgatctcaagcagttgccgaatgcgctcggtcatctggtacgcacctgggaagaaaaaggccgccagcttggtgaactggccagccagtggccgatgatttataccgttgctgcgggtccgctgcgtccgctgggttacaaagaaggcattgtaacgctgatggaatttacctggacgcacggctgcgtgattgagagcggagagttccgccatggcccgctggagattgtcgaaccgggcgttccgttcctgttcctgctcggcaatgatgaaagtcgccacaccaccgaacgcgccattaactttgttaaacagcgtactgacaacgtgatcgtcatcgattacgccgaaattagccaagggctgcacccgtggctggcaccgttcctgatgttcgtgccaatggagtggctctgctactacctgtctatttacaaagatcacaacccggatgaacgccgctattacggtggtctggtggaatattaatccctctcccggcccggcaacgggccggatttacgcaaggagttacccgatgaaaacaggtatgtttacctgcggccaccagcggctgcctattgaacacgcatttcgtgatgcaagcgagctgggttacgacggcatcgaaatttggggcggtcgcccgcacgcgttcgcgccggacttaaaagcgggcggcatcaaacaaatcaaggcgctggcgcagacgtatcagatgccgattatcggctatacgccagaaaccaacggctatccgtataacatgatgctgggcgatgaacatatgcgtcgcgaaagcctcgacatgatcaagctggcgatggatatggcaaaagagatgaacgcgggttatacgctgatttccgcggcccacgcgggctatctcacgccacctaatgttatctggggacggctggcagagaacctaagcgaactgtgtgagtacgcggaaaacatcggcatggatctaatcctcgaaccgttaacgccgtatgaaagcaacgtcgtgtgtaatgctaatgatgtgcttcatgcgctggcgctggtgcctagcccgcgcctgttcagcatggtcgacatttgcgcgccgtatgtccaggcggaaccggtgatgagttatttcgacaaactgggcgataaattacgtcatctgcatattgtcgacagcgacggggccagcgacacgcattacattcctggagaaggcaaaatgccgctgcgggaactgatgcgcgatattattgagcggggctatgagggttactgtacggtggagctggtgacgatgtatatgaacgagcccagactctatgcccgccaggcgctggaacgctttcgcgcgctgctgccggaggatgagagatgaaaaccctggcgacaatcggcgataactgcgtcgatatctacccgcaactgaataaagcgttttctggcggtaatgcggtcaatgtggcggtgtactgcactcgctacggcatacagccgggatgcattacctgggtgggtgacgatgactacggcacaaagctgaagcaggatctcgcccgcatgggcgtcgatatcagccatgtccatacgaaacacggcgttaccgcacaaactcaggtggaactgcacgacaatgatcgcgtttttggcgactacaccgaaggcgtgatggccgactttgccctgagtgaagaggattacgcctggctggcgcagtatgacattgtgcacgcggcaatctggggacatgcggaagacgcattcccacagctgcacgctgcgggcaaacttaccgctttcgacttctccgacaagtgggacagcccgctctggcagacactggtgccgcatctcgattttgcctttgcctccgcaccgcaagaagacgaaacgctgcgtctgaagatgaaagcgattgttgcccgtggcgcaggaacagtgattgtcacgctgggtgaaaacggcagcattgcctgggatggcgcgcagttctggcgtcaggctcctgaaccggtgacggttatcgacaccatgggtgccggagatagcttcattgccggattcctttgcggctggtctgcggggatgacattaccgcaggcgatagcgcagggaacggcgtgcgcggcgaaaaccattcagtaccacggtgcctggtaagtataacgttggcgtgagcatcttcacgccaacgtgctgttacttgccggaaaacgaccctataatccgagtaattcattctttatttcagggtcgattatgagtgctacggaccgctactctcatcaactcctctacgctaccgtccgccagcgactgctggatgatatcgcgcagggggtttaccaggcgggcaacagatccctaccgaaaacgagctttgtacacaatataacgtcagccgcattaccattcgcaaagccatcagcgacttagtggcagacggcgtactgatccgctggcagggaaaaggcacctttgtacaaagccagaaagttgaaaacgccctgcttactgtcagtggttttaccgattttggcgtcagtcaaggcaaggcgacgaaagagaaagtgatcgaacaggaacgggtcagcgccgcgccgttttgcgaaaagctgaacatccccggaaacagcgaagtgttccatctctgccgggtgatgtatctcgataaagagccgctgtttattgatagtagttggatcccgctgagccgttatcctgactttgatgagatttacgtcgaaggaagctccacctatcagttatttcaggagcgttttgacacgcgagtggtcagcgacaaaaagaccatcgatatctttgccgccacccgcccgcaggcaaaatggctgaaatgcgaactgggcgaaccgttgtttcgcatcagcaaaatcgcctttgatcagaatgacaaaccggtgcacgtctccgaactcttctgccgcgccaatcgcatcaccttaactattgataataaaagacattaaccgtaggccggataagatgcgccagcatcgcatccggcgatgctggcgcgttgaattttacatcccgtacgttcccctcaccctaaccctctccccaaaggggcgaggggaccgttcagtacggaatttagcttgacggtgctatccagcattaaatactggcaatactctcacgcaaaatccgcagcaccgtctcttcaccgctgcgattcgggttaatgcgaatcgcacaatgttcactttgtggattcgcctggcgaaacgttccggaaaggcgataaaagagcggcgggatttcatatttgctctctgcacccaccgggtaaggcaaggcaccgcgcttttgcgcctcttccagcactctggcggcaatcggctgatgaaactcgacaatcaacaccttgctctgcgcattagcaatcaccgcgcttttcacttccggcaccgcaccaccgttaagcaaagccagcaaccgttcagatacccctgcctgcaccgcgtgcatcactggcgcaaacaccagaccacgcaatacttccagcgcctgtgcgccctggatctggctaccgccggagtaaagcgtggcgcgaatacggttgataacatcagcatcgccgaccactgcaccaacaccctctggcccaaatagcttgaagcaggaaaatgtgctgacattcgcgccgcattcacagccgattcgagccaccttcatcaccgcatagttgtcatcggttaacgctggaacacctgccgcgcgcaacgttgccagcacatctgccagcacgtagctgtcctgcggctgctggcgcgtatgctgcaccagcgccgcatccggttgttgctcgtcgacgacctgcttcagtgcgctcaggtcattgaaatcaacagtaataagcgtcagccccatctgctcaataataacccgtgtcgtcgggtaaacaggcgcgtcatgcaccagaagacgctgccccggtttgagcaaagccgccagcccggcgcgaatcgcgccagtccccgcgtcctgcaccagcgccgcagcctgtgcgtgaaatgcatcagccagcacctgttccacacgctgggtaacgcgcggttgattcagtcctggcgttaagcctaaatcaccgccagtaagaaactcgctgccggggaaatggcgacaaatgctatccaccagcgcaaactgcttttgctgcgcctcaataatcgtcaggctttgcagaggaaacgtcttcataggtgccttccttaagccggaacgaacaggccaagccagtaaagaacattcagcagaataccggtgatcattactgccacgaccggtgccgccattttctgtaccggacggcccagggattcgttgaggaagtaaatggcaaccgcgatagagaatccggtataacccgccatcttaattgctgcgaaaatgctaccgaccagcagcgccacttccatcagcatattcatggcgttacggatgttatcgctcgcattacgcacgctcgggtagcgtcccagccatttgccgatgctacgaagcagcaagacttccgcgctaataaccactgcgcctaataccgctgcaaccatcggattcgggctgagatagtccaccgcataaacaaaggtaaagcccgcaactgcatacacacccgttgctaacgcggtggtggcaatcaacggcacaaaccccagtccgcgcataaattctgccagagccgcctgattaatcagcgtttggctttgttccggcgttacgcctgcggaatatgctttctccagtgtgaagatgctcacttcactgccagcaaaaatcttcatgctggcaacggcggcaatcaatgctcccacgatggcgatatagggtaagtttttgataatccgactcgtgcgttcttcaaacacgctaagcccgctggcatcaatgtcattttcatcacgatgacgcaggtcgtgagttatcgcgatccccagcagcatcaccatgccaataaagatttcgatggattcagggttaagatgtgggaaatagcgcacgactaccacacgggtcatcagtaccaccacggcggcgatcagactttgcttccagccaaactggtagaaaatcgccaccagcgggaacagtgcaaaagcactaaccaccgggctgcttaattcccccaggctacctaatacatccaccggcagcgcggtcagcagctggtttactggcaacaggcaagtaaggatcaacacgccccagatagcgccaagaccaaacgccatcaggctgtttatcgccaggacgccgaggatatcggtaggaagaaagagtaaccatgcgttgagcagcccggttttcagggtaaaagagatccccacgctggccacaaaaccaatgctcagaccaaaagcgatactccccgcctcgcgacggttcatatagccttcaatcagttgcggcaggatcgggcggatgccgtcatgaaaaacagccgcgctgcgatgcgccagaaggcttgtcatacccgtcaggcacgccaccacgataatctgaatatacagatccatagtcgtgccttttatttcagatggttaatcagcatcggaatcgcgtgttcgacgtgctcaacggaaaggccaaacgccacttttccttcagcgatcattttggcgatatgctcgtctttcgctttaatgcctggtttggcaatggtgcaacttttgttatagcctatcaccgcgatggcaatgctcaatgccgcgcccgcaccggtattacacgcgccgatgtaataatccagttgcccggatttcaccttcattgccgcttccatgtcgttgtgaatgaaaacttcaaaacagccaggagccgtcgcttcaatagtttttttaatctgctcacgctgtaagcctgcaacgccaatctttttcatgagtctgtccttattggaaaaattgagagggattttcacgtaacatcacatccacatcggcctgactgaatccactctggcgcaattgcggaataaaggtggttagtaaatagtcatagccataaccaccgttggcttttaaatgggagcggcgcgtaatatccatgctcagcatgacgcggttcagcaacccacggtcgcgtagcgcatgaagcatcgcaatacgcttttcgtccgggtagtaactgttcttgccgatggtgtcgaactgcacgtacgcgccgagatcgatcatcttcaaaatgttgtcgaggttgtctttcagatcgcagtgaccaacggtgacgcggctaagatcaaccccgtgggcttgtagcaacgccagttgctccagccccatcgtgctgaagctcgtatgcgtggagatcgggcgtccggtctggttatgcgccagcgcagcggcaataaataccttctcttccagcggcgtaatctttccttcgctggtgccgatctccgcgatgatcccggctttcagctccgtgccatcgataccctgttcaatttcatcgaccatctcctgcgccagttcctgcacgctgcgggtcgccacatgttccgggaaaaacgcgtcctggtaataaccggtacaggccaccacgttgatccccgtctcgcgcattacatcaagcataaattgcgcattgcgccccatgtaacggttggtcatctcaatcacattacgcacgccccgggtcatcaggtcgttcatctcctggcaaatgaacgcatactgatcaaggcggcagtccacgttgtttttaaagccggagagatcaatatgcagatgctcatgggcgagggtgtaacccgtcggatcaaaactcatagggtgtctcctgcaaaccggagggaggaaagaaaagagcgaccattttgtggcggtggcgcgcggaaaaattcacacacggtagcccccacatcagaaagcgtggtgcgcacaccgagctgcgtagcgatcatcccttgctgataaaccagcactggcaccacttcgcgggtatggtggctgtgaccaatggtcggatcgttgccgtgatccgccatcacgaccaggcaatcatctggctgcatcgcctcaacaagccgggcaaggttacggtcaacgacctgcaaacgttcggcataacgtgcgacgtcttctgcatgaccagcgaggtcggtttcctgaatgttggtgcaaataaacgccgtcggatgggtgttaaattcgttgagggtgatatccataatccgctggctatccaccagattttgccagctcacgccataaggattgttgacgatatctgccaccttacccaccagcacggttggcacgcctgcttcatacagtttttgtggcacctgcactttttcatcgacgccatagcccatatgcacgacctggaaaccgttgtcataagcgccagaacgcggcgcattgataccaataaagcgcccttctttgctttctgcggcatcgagaatgcgttgactgtcggttaacaggccaccaaatgtaatgacccgaccgacctgtacctgctcacgcacgatacgaccaattttgattgcgtcgtcaaaagagatcacagagagattggcggtaatgttatagacctggcctaaatccgcctcgagattatcgccaatcgcaaccgcctgattgacccacagaaattgcagatcatcgccacggcgctccacctgccagccagcggaaactaatgcctgctcaacacggtcaatcacatcgcgaaaaggcatccgcagcggcggtaacgggcgcgtgcctaaaatttcctgatgccccataaaggtatcgccaccttcatgttgcagctctgccacgccccaggttgcggaatcactcggctgcatatcgcctggcgcataacccaatgcgttgattagccccagcgtctccagcgttggtagctgcaaatgcggcaactggctcaggatgtgaccacatgtattcgctcccgcatcttgcggacgcaccagcgtgacatctttcattgcccctacgccaaagctatcaatcactaacaccacaaatcgcgccattacgcccccagagagtttccaagactgtcataacgaccgacgatttccggttcgccacgatgaataccggacaccagcaccacatcgctacgggtgacaaaaatctgcgtgcgaaaacagagcaccactgcactgcttaccggaaactcgcctgccagcggcagggtgtagtcgatactgctgtcatccacagttttgagattggtttcagtaatcttttgattttctggcgtaaacaccaacgcatgttgcgcatgaccacgacgatagtaaccgccgccgtagcagtagctgtcgccacggaaatgatgggagatttcacttaaccagagcatcgcgatacgttcaggctgatcgccctgctggtttgccggaatagtgcccgtcagcgcatgaccgggttcggcatgagtcacaccgtattgcgccagtaatggcaggctagtgcagctggtcgcactaggcgcgttcagttgctcaagtgcaataccagatttcgccagttgatcccgtgcctgtatcagcgtgtgaagattcggtgtcggcaaaacttttccgacagcctcatcccaaagcaggcaagggaaatgggtaagtccggctaaatgcagccctggcagattctggatttcggcgacaatctccggcaacaccttgagggcaaaaccgctctcctggcccggataaagaaaatcatcgtcgctataaactttaagcagcacagactggattcgcccggccttcaccgccgccgcagaaacttcccgcgctttgtcgagagtaaacacggtgatgacgtcggtgccctgttcaacggcgtcagcaacctgatgacaagggatttgtaccagatgcccctgatgcgccacaggcaaaccagcgcggcgcatgactcgcgcctctttgtaatccaccgccacaatgccgctgtagcctaatgccagcaatttttccgccagccacggattacgaccaaactgcttggtcatcagatacagttcaatgccgtaaagccgcgccgtctcaatcagccgcttaccgttttccagtatctgatccacgtcgatcacccagctgtccggggcgatcttgccctgctgccacaggcttagtgcggcggaaatcagcgccgggttctggcgtttcaatgcttctacaaacatcttgttgcctcgtttctgttccttgaattaaatattcatttttttgaatatttaggttgtgcgacgtggatttgtcgggagcttcaaacctcttcgttagcagccatccataatccataaaggttggccagcaaatagccttcttcacacgggttaacttccagtgcgaattccttcaacaacacctgatgcaattgcacaacggcttgccagtggctggattgcgccagttctgccagcaactcgttatccagcggctctatttcttcaccacggcgactgcgcatcagtgcactcgccatatgtgtcatcgccatcgttccttgctcactgcgcaccggcagatggcactctgtttccagtacgttgacgacctgcatcatgcctttgcagatgtccttatcaataacgcctgcctcgcaaagcaggttgagtctggtttccatatcagatgcctttcgtttaataactcggttcctgttccccactcactacccgttgttgatgggcgagcagggcgtgtttatctacaacggcacgcagcagttgttgcattgggtaatcatcgactcgcgtcaggaccacggcttcggtggcctgtaaaaatcgcggatcgtctgtgagcggcgtcgcctctaatcccagcatggtcagttcgttttccgccaccacgttccagatcaccgcatcgacatcgcctttaacaatgcgttgtaaactctcgtgataagagagatcgactcgttccacatcactaccgccaaaaaaaacatcggtcatgattttctgatccgcgctacggttatccagccccacgcgcttcacgtttgcggactcgcctttacggcaaatcaactggtgctcgccaacgtaggtgtgcggccccaactccagcgcgaggcataagcctttttgcgtgagataactttccgccgctagtcggctaaccaccgccatgtcatacacgccattaagcagacactccacgcgaatatccgcgccacgcatgtgcgcatagtaaaaaggaatgccatcaaactgggctttcaatccgctcgccaggccttcgtacaaacgggtatagggcaagggcattgcacataccacgttgttgatatccacatgagtcagcaatgctttgttatccatctcgaccagataactgccattgcgcccacggcgttcaatccgtatcgctccgctactttccagcgttttcaacgcggcctgcgtcaggccaacggaactacggcattcatttgccagctcatctatggttttcaatcgattaccgcacttttcacccaacaaataacgggccagcgtcgtgatgacgacgccttcttttttgataaacgttcgacgcataataaattttcagtaaattgaatatttatatcttcaggaatttgaagataaggcgcaacagcgagatgtggaaacggcgaggcacttcacattttttcggattattgcaaatgaggataaaaaaaccgggtttccccggtttcagagtgatgataaaagcaaaattgcctgatgcgctacgcttatcaggcctacatttccttgcaatatgtgcattactttgtaggccggataaggcgttcacgccgcatccggcatgaacaaagcgcaatttgccagcaatagtgaattacggcttcgccacaaaaccaatcgcttcgtacaccgcttttagcgtacgggaagcgtgcgcgctggctttttccgcgccatctttcatcacctgttgcaggaaggcttcatcgttgcggaaacggtgatagcgttcctgcaattcagtcagcataccggaaacggcatcagccacttcacctttcagatgaccatacatcttgccttcgaactgtttttccagttctgggatgctctggcccgttaccgcactaaggatatccaacaggttggaaacgcccgctttgttctgcacatcgtagcgaactaccggcggctcgtcggagtcagtgaccgcacgtttgattttcttcactacgcttttcgggtcttccagcaggccgataacgttattgcgattatcgtcagacttggacatcttcttggtcggctccagcaggctcattacgcgcgcgccagatttcggaataaacggctccggcaccttaaagatctcgccatacagcgcgttgaaacgctgggcaatatcgcggctcagttcgaggtgctgtttctggtcttcacccaccggtaccagattagtttgatacagcaggatgtccgctgccatcagcaccggatagtcaaacagaccagcgttgatgttctcggcataacgcgcagatttatctttaaactgcgtcatgcgactcagttcgccgaagtaggtatagcagttcagtgcccagcctaactgtgcatgttccggcacgtgggactgaacaaaaatggtgcttttctcaggatcgataccacaagccagatacaaggccagcgtatccagcgtcgctttacgcagcttctgtgcatcctggcgcacggtgatcgcgtgttggtcaacgatacagtaaatgcaatggtagtcatcctgcatgtttacccactgacgcagcgcacccatgtagttaccaatggtcaattcaccactgggctgtgcgccactaaaaacgatgggcttagtcatttttgctttcctgattttcgctatgcggaagccctaatgcgggcagaaggtcatttatagactgataaattacatcaggctggctgagatcgatagcctcgccgtagttatatccgtaggttaagccaacacttgggcaacctgccgcttttgccgcctgaatatcattgcgactgtcgccgacaaacagcatctgttgtggggcaattcccatccgctcagccaccagtaacagcgggtccggatgcggttttttgttttgcacatcatcaccaccaatcaccacgctgaagtatttggcgatatctaaggcttcgagcagcggcgcgacgaacggcgtcggtttgttggtgaccaggcctagcggcaggcctttagcctgcaacgcgcccaacgtatcggcaacgtgcgggaacaaaaacgtcccctcttcggcaacctcgccatagtagcgatcgaacagtttacgcagaatacgtacctgttcttctgccggaatgtcgtcatcaacgggcggtttacccattgttttacgctgagtcgcacgttcctgacgcgcccaggtcaatgcgcgctccatcagaacatctgcgccgttaccaatccaggtaataacgcgttcttcacctgcgacgggcaactccagcgcatacagcgccatatctaccgcagcagcaagaccaggagcactgtcgaccagcgtaccatcaagatcaaaagcgacgccgcgaatatcttcaaacttattcatgacttacctttgccagttcactgcgcatttcatcaatgacttttttgtagtctggctggtcgaagattgcgctaccggcgacgaacatatccgcgcccgccgcagcgatttcgccaatgttgttcaccttcacgccaccgtccacttctagtcgaatgtcaaagccagactcgtcgatacggcgacgtacttcgcgcagtttatccagtgtttgaggaatgaaagactgaccgccgaaaccagggttgacggacatcagcaggatcacatccagcttatccatcacgtaatccagatagctcagaggtgtcgccgggttaaataccagacccgctttacagccattttctttaatcagttgcagcgtgcggtcaacatgctcggaggcttctggatgaaaggtaatgatgctggcaccagcggcagcgaaatcaggcacaatgcgatcgacgggtttcaccatcaggtgtacgtcgataggggcggtaatgccatagttacgcaaggatttcagcaccattggcccaatcgtcagattgggaacatagtggttatccatgacgtcaaaatgcacgacatcagcgccagctgccagggcttttgcggtatcttcacccaggcgggcaaaatcagcgctcagaatactgggggcaatcaaatactgtttcatccgcttctccttgagaattattttttcgcgggactaacgactcctggtttgtacaaagccagcagttcgtccacctttttacgtgtgccgccgttgctgcttatactgcgtcgaactttgacgacatgcaattttgcgcgctgataccactcacgcgttaacatcgtatcgtgattggagatcagcactggaatatggcgctcaaccagaccttcggcgatctccgccagatgcgcttgttgttcaagcgtaaaactgtttgtgtgatacgccgtaaagttggcggtcgcagacagcggtgcataaggcggatcgcaatagacgacggatgcatcatctgcgcgcgccatgctatcggcgtaagactcacaatagaaaaaggcattctgcgctttttcagcgaagtgatacaactctgcttccgggaaatagggttttttgtagcggccgaacggcacgttaaactcaccgcgcagattgtaacgacacaggccgttgtaaccgtagcggttcaaatataaaaacagtaccgcccgacggaacggatcctggcttttgttgaactcttcgcggaactgatagtaaacctcggcgcaatttgtttcgggaacaaacagctcgcgtgcggcctgtacgtactcatcagtacgcatcttcacaatgttatagagactgatcaggtcgctattgatatcggcaaggatataacgagaaaagtcggtgttgagaaacacgctcccggcacctacaaaaggctcaaccagacattcgcccttgggcaaatgccgtttaatatcatcaagcaggggatacttgccccctgcccacttcaaaaaagcgcgatttttcttcatgctgactaactaattacaccttctccggctgtggagaaagctccgacagcatccagcgcttcaggcaactcccgcaacgataaaccattgcgggagataaccttgattacttcagatcggcctgtacctgacgcagcggtttcgcccacgggtttttggcctggacatctgctggcaatgtagataccgcttttttcgcctcttctttgctagcgtacacgccagaaaccaggacataccacggctgaccattacgcgtcgtttcatagacaacgtagtttttcagattctctttcttcgcccaaccgttcaggttgtcgtagttagaggaactgctcagctgcagagtgtaatggctggacggtgcgcttttcaagctaccaacattacctgcggtcttcgccccagcagcgggtgttgctgtggtttgcgccggggatgccgtctgtactggagccgtagtcgccgtctcttttggtgctggcgtagaagtcgcagccggtgccttcgtgctcgccacaggggcagctggttcagtacgcttcggcgtctgtgctaccggcttcggctccgttttcacggttgcttgcggttttttcggttcaatcaccgcctgctgacgagctgggcgcgtagtggacggacgttcagcggtttgcgttttcgccgtgtcacggcttgcattgccattgcgaacaggcgcaaccgttgcgggttcagtcggcaacgtggaattgaccgccacattgttcagctgttgctgattttgtggctgggtcagcgcattgttcaggtcaccctgcacttcaacacgttgttgaccatccgttgccaccggggtttgcccttgagtcggcgtagaagagatcggtggcagagaaacatcctgctgagtattttccgcagacgtggttcccggcgctggctgcacgccattcgcctgatcggtcgcattgccagcaagatcaatactcttctcgccagacgcggtttgatcgctggaagtggtgctgggggcttttagcgcagaaccgataccgatgatcaacagcagtagaaccagaatgccgacgcccatcatcatatactgacgagaagcgggtttactggctgcttttttgcgcttacgcggacgacgctctacgcgctcttcatccacggtttcatcttcggattcgtcaatttcttcttcgatttccggttcctcattgcgctctttttgcgcacgagtcggacggcgatcgtcagtgtcatcaagttcaatatcatcaaaattgatctgcggttcgccacgttcagtacgctcagaacgttcagaagattgacgagaacgaccagtacgacgatcgctgggatcgggtttcagctcgtcttctggtttgaattcatccatttaacaccccactaaaaggttaatgcttaccacgttgcaattaacctgaagctaatagaccgcttgataagcggcctgacctttcttgttgttacgcactttgacaatcggcaatggcgttaagaacaagctcgtggctaacgccgctgcgaacttcactcttaccaattgccaacggaagaattaagcgcatctctcccgcaaggactttcttgtcacgcagcatatgcggtaaatacgcctgcgcggacatttcgcgcggcccattgaccggtaacccagcccgcttgagcagggttataatacgctgcgtttcggcagaactaaactgcccgagacgttcgctcgtccgcgccgccatcaccatacccgcagcgaccgcttcaccatgtaaccaattgccataccccatttcagcttcaatggcatgaccaaaggtgtgtcccagattcagtaaagcacgtaacccggtttcgcgctcgtcggcggcgacaacttctgccttcagttcacaacaacggcgaatacagtacgccattgccggaccgtccagacgcaacaacgcatccagattctcttccagccagttaaaaaacgcaccgtcaagaataatgccgtatttgatgacttctgccagcccgctcgctaactcacgcgggggaagcgttttcagacagtcgagatccaccaccacactagcaggttggtagaacgcgccaatcatgtttttaccgaggggatggttgaccgcagttttgccgccaacggaggaatcgacctggctcagtaacgtcgtcgggacttgaatgaaacggacaccgcgctgataactcgccgccgcgaagccggtcagatcgcccactacgccgccgccaagcgccaccagcgtagtatcgcgaccatgcggtttttgtaacaacgccgtaaagacggtatcgagtacagccaggcttttatactgctcgccgtcagggaggataacgctatcgacgttaacacccgcctgttcaagtacgccgcggaccttatcgagatacagaggagccagggtttcgttggtgaccaacatgacctgctcgccgcttttcagcggtaagaaactagctggttcattaaacaaaccagatgcgatggtaattgggtaactacgttccccgagagtaacgacaatcctctccataacgcgacatccaccttaattactgtacccgcagacgagtgtatataaagccagaattagttgctttccagcatgtgaataatctggtttgcaaccactttagcgctttgatcatcagtacgaatggtcacgtcggcaatctcttcatacagcggattgcgttcattggccaacgcttccagaacttcacgcggcggtgtttcaacgtgcagcaacgggcgttttttatcacgctgcgtgcgtgcaagttgcttttcgatggtcgtttcaagataaacgacaacgccacgagcggaaagacggttacgcgtttcacgggatttcacagagccgccgccagtagccagcacaataccctgtttctcggtcaactcattgatgaccttttcttcgcgatcgcggaagccttcttcgccttctaaatcgaaaacccagcccacatcagctccggttcgtttctcaatctcttgatcggaatcgtaaaattccatattgagttgttgagctaactggcgcccaatagtgctttttccggcacccataggcccaaccagaaagatattgcgtttctctgccattttttcggtactactaagactattcgttaatgataaacccgcttcgctcagagagcgccgcaggacatgaactgaaacctcataagatattgcgagagtcagactgaaaattatctcaatactccagcgggtttggcaactgaataaatcacccatccctctgcatatctggtcgctgcaagcgcgctgccttgctaccaccgctctggcgataaatcaccgggtaagattagcgtaaaaaagacagcaaaatgccgcctgaatgataaatcatcatcatggaacgcaggcagcgaagagcaccaactctcaaatcggtactccttgtatgctaaatacctgcgcgcgtcaaatagatgaaacacgttcagcgtaaaaacattaccgcttttacggctgtttactcactggaaaccagtcgtggcgtgataaacaccactaactcgcgtcgttcatcttcttttccgtcatgacgaaatgattgcccgaaccagggaatgtcgccaagcaacggtacgctatcctgaccgcttttatttttacgggtaaaaatgccgcccagcgccaacgtttctccgcttttgacctcgacctgcgtttcgatctcctgcttatcaatcgccagcacttcgccatcggcctgctgtagcacctgccccggaacgttctggctgatgtgtaatttcagccggatgcgacctttttgtaacaccgtgggcgtgacctccatccccaggacggcctctttaaattccacgctcgtcgcgccactttccccgctggaaacctgatatggaatttcgctcccctgtttaatgctggcaggctgaagatgactggccagcagacgcggactggcgataatatccagctgctgtttttgttcgagcgcggaaagctcaagatccagcaagcgtccgttgatgcgcccaatgttaaaaccgacatgcgttgtcgccgtcgctacggagaggtcgctaccaagcgtggtgacttgcccaacgccaccagcgtgttgcgcatcggccagcgtccatttcacgcctaactcacgcaaacttttttcattaatggtgacaatatgcgcgctcagctcaacctgcccgaccggcagatccatttgcgctacccactgttcaagcgcgcttaacgccgttttgttatctcgtagcaaaaggcgattggtgcgtttatcgacggtcatactccctttggcactcagcagcttctcccccgctttcgccagttctcccgcgtcggcgtattgcagggttatactgcgattttccagcggcagatttgcctgcgcccgcgcctgctccgcctcctggcgggcgatattgttattctgccaggcaatggaatgcacactgagaatgttgccttcctgccgcgttatcagtccggcgcttttcactacagtttgtagtgcctgcttccagggaacatctgttagatgtaagctcaccgtaccgctgacgtctgggctcacgaccaggttcaacttctcctgttcagccagcgcctgcaacacctgagctaccggaacgtcatccaccatcagcgtcactttttgcggctttgccgcctgtacgccgggtatcagcatcaacagtagtgcggctatccattgcttcatttgtatctccttgccgttgccacaaccattgtggcggttcgcagtttgtcccggtacccagcgttagtacgtctggcgtcagctgtaaaattgtccagccgttttccagcacatcgttttgctgcacccgtcgccatttcttttgcccgtcttttattacaccgatgatgcgctcgcctcgccctaccatcccctgatagcgccactggctaagttcgctaatccggcatagatcttccggcggtttaaaagggtcacgcataccggttaaaaggcacaatgcaatacctgccaacaaccagcgtttaaccctcatgcggcgtctccagttgtagcgtgaacaaaagatcatcaccttccacgcttaagctaaaacggctcacgctgacgttgcgctctgccagccgtgtaaatgcgctcggcactgcttcccacagcgttttcaacgccaactcgcctccctgcgcggatggatgccaggaaaccagttgcgcgccggataactgaaaatccagtgggctaaagggcagcgttttttcctcgctgaagggagcggtgtctaccaggcgatacagtgcggcccactgctggtgatgacttgcccgtagtcgaattaatgcgtcgcgctcttcatggtgtgtgctactcagaaaaatgagcgtaactaacatcagcaaccagaatgcccagcaaagctggcggaggcggggacttgtggcgaaccaccagtcaaagaacatgttcatcgctaaccttccttgttaactgatactcaaattgccagcgtccctgcgcatcctgctgcgtggctccccgctgattgagatgaaaagatgcatcctggcggagactcgtttctagtgcgtttaacgcggtaatgcttgttgtcagccccttgatctccagcgttccctgctgccagcttatcgttgtcagccaggcgtgctcgggtaaaagcgccgccagtgcttccagcgcagattgccagtcgcgggtaaattgtcgctggcgctgccgttggctacgctgttcgcgtaactgctgttgctccagcaaacgtggcttcgttatctgtaagctgcgggcgagttgttgttccgcctgaagcaaaactgcgtctatgcgcgcttcggcgctgcctgtcagacgcagtattagcgttatcccgacggccagcagcagaggcgcaacgaacatcagcaaccagaaacgcagaaaagcggtccggcgttgctgtcgccagggcaaaaaattaattggcgggttcatcagtacgccttcccaagcgccagccccagcgcgatggcaaagtctccacctggcggcggtagcggcggctgacgaacagaaacggcctcccagggatcaaatccgccttcgccacatatcgcgacgctttcgggatcaacggataacgctgccgccagctccttcgcgctagtcatccccaccgccagtttgcgcccccagctatagcgcgtcgcccacagccactgttcgttatcacgccaggccagacattgctgatgagaaggtaaaaaaggcaggaatcgctgtaatgcactggcatccggggtgatcgcgctcacatgaacacgcaacctttctgccagagtaagcagcgttgccagctctttgctttgcgcggcagtcacgttataggcgggactgagactgtcttcgctgtaatcgaagcgcagggagtccggatccatatccagctcgcgggccatcgtcccactcagccaggccgtttgctcccgctcaccaagggacatgctcgggcgcggaaaactccgctgtaatgtgcgactggcgggaaacgccaacataatgtgatgacgctgcggcagttcgcgactccacggtaacaacgttttagccagctgctgcgcatcaacaatccgcccatctttgataatgtcgttctccagcggcaaccgccaccagcgttgcaaaaagcattcttttgcgccccgcacgatcgcaaccgctaccgcttcttgctgttgtaaatgcaaaccaatttgccagatcttaaatgccattgtgatgatctccttatcacccgtcactctgacgggtatatcaatgcgtctggcttgcctttatactaccgcgcgtttgtttataaactgcccaaatgaaactaaatgggaaatttccagtgaagttcgtaaagtattttttgatccttgcagtctgttgcattctgctgggagcaggcagcatttatggcctataccgctacatcgagccacaactgccggatgtggcgacattaaaagatgttcgcctgcaaattccgatgcagatttacagcgccgatggcgagctgattgctcaatacggtgagaaacgtcgtattccggttacgttggatcaaatcccaccggagatggtgaaagcctttatcgcgacagaagacagccgcttctacgagcatcacggcgttgacccggtggggatcttccgtgcagcaagcgtggcgctgttctccggtcacgcgagtcaaggggcaagtaccattacccagcagctggcgagaaacttcttcctcagtccagaacgcacgctgatgcgtaagattaaggaagtcttcctcgcgattcgcattgaacagctgctgacgaaagacgagatcctcgagctttatctgaacaagatttaccttggttaccgcgcctatggtgtcggtgctgcggcacaagtctatttcggaaaaacggtcgaccaactgacgctgaacgaaatggcggtgatagccgggctgccgaaagcgccttccaccttcaacccgctctacagcatggatcgtgccgtcgcgcggcgtaacgtcgtgctgagccggatgctggatgaagggtatatcacccaacaacagttcgatcagacacgcactgaggcgattaacgctaactatcacgcgccggagattgctttctctgcgccgtacctgagcgaaatggtgcgccaggagatgtataaccgttatggcgaaagtgcctatgaagacggttatcgcatttacaccaccatcacccgcaaagtgcagcaggccgcgcagcaggcggtacgtaataacgtgctggactacgacatgcgccacggctatcgcggcccggcaaatgtgctgtggaaagtgggcgagagcgcgtgggataacaacaagattaccgatacgctgaaggcgctgccaacctatggtccgctgctgcctgccgcagtcaccagcgccaatcctcagcaagcgacggcgatgctggcggacgggagcaccgtcgcattgagtatggaaggcgttcgctgggcgcgtccttaccgtagcgatactcagcaaggaccgacgccgcgtaaagtgaccgatgttctgcaaacgggtcagcaaatctgggttcgtcaggttggcgatgcatggtggctggcacaagtgccggaagtgaacagcgcgctggtgagcatcaatccgcaaaacggtgccgttatggcgctggtcggtggctttgatttcaatcagagcaagtttaaccgcgccacccaggcactgcgtcaggtgggttccaacatcaaaccgttcctctacaccgcggcgatggataaaggtctgacgctggcaagtatgttgaacgatgtgccaatttctcgctgggatgcaagtgccggttctgactggcagccgaagaacagtccaccgcagtatgctggtccaattcgcttacgtcaggggctgggtcagagcaaaaacgtggtgatggtacgcgcaatgcgggcgatgggcgtcgactacgctgcagaatatctgcaacgcttcggcttcccggcacaaaacattgtccacaccgaaagcctggcgctgggtagtgcgtccttcaccccaatgcaggtggcgcgcggctacgcggtcatggcgaacggcggcttcctggtggacccgtggtttatcagcaaaattgaaaacgatcagggcggcgtgattttcgaagcgaaaccgaaagtagcctgcccggaatgcgatattccggtgatttacggtgatacgcagaaaagcaacgtgctggaaaataacgatgttgaagatgtcgctatctcccgcgagcagcagaatgtttctgtaccaatgccgcagctggagcaggcaaatcaggcgttagtggcgaagactggcgcgcaggagtacgcaccgcacgtcatcaacactccgctggcattcctgattaagagtgctttgaacaccaatatctttggtgagccaggctggcagggtactggctggcgtgcaggtcgtgatttgcagcgtcgcgatatcggcgggaaaaccgggaccactaacagtagcaaagatgcgtggttcagcggttacggtccgggcgttgtgaccagcgtctggattggctttgatgatcaccgtcgtaatctcggtcatacaacggcttccggagcgattaaagatcagatcagtggttacgaaggcggtgccaagagtgcccagcctgcatgggacgcttatatgaaagccgttcttgaaggtgtgccggagcagccgctgacgccgccaccgggtattgtgacggtgaatatcgatcgcagcaccgggcagttagctaatggtggcaacagccgcgaagagtatttcatcgaaggtacgcagccgacacaacaggcagtgcacgaggtgggaacgaccattatcgataatggcgaggcacaggaattgttctgattaaaaaggcgcttcggcgccttttcagtttgctgacaaagtgcacttgtttatgccggatacggcgtgaacgcgttatccggctaacaaaatcgtgaaaactcaataaattgcagaaaccccataagcctgataaacattgtgcatcaggcaaacttcacgcatttacactcgcccctgccctttcaaccattcgcgcacgaggaacagcgcactgacattgcgcgcttcattgaagtcagggtcttccagccaatccatcatatgcgccagcggccagcgcacctgtggtagcggctctggctcatcgccttccagactttccgggtagagatcttgcgctaccacgatattcattttgctggaaaagtaagacggtgccatgctgagcttcttcaaaaaagtcagatcgttcgctccaaatccaacctcttcttttagctcgcggttagcggcttcgtagacgctttcacccggatcaattaatcctttgctaaaacctaattcgtaggattcagttcccactgcgtattcgcggatcaggatcaggtgatcgtccacaatcggcacaatcatcactgcttcccggttggttggacgcattcgttcataaacacgccgcacgccattgctgaactccagatccacgctctcgacggtaaacagtcgggaacgggctacagtttcaacattcagaatggtgggtttttgtaaacttttgctcatcgtgggatctatgctgtgaaatcagcggttattgtgcgatatcggacacgctttcggcaatgtgaattgcatgttatttacatttatgtaacttaataaataatcgtcctcaaatcaaattaaaagtcaataggttgaaataactccaggaatttgctgatattccgccttcagagggtttgctatgatcagcggttactgtgatgtgcttaatgatgctcaagttaaactccacgcttgccgatagccaaccgcagaatcatgtattgtgtccggtgcgactgaccacgcctgacagactaagtaagatggggaaagcatgagcaccattgtgatttttttagctgctttgctggcctgcagtctacttgcgggatggctgataaaagtgcgatccagacggcgtcagctgccctggaccaacgccttcgcggatgcgcaaacgcgtaaactcacacctgaagaacgtagcgccgttgaaaattatcttgagagcctgacgcaggtattacaggtgcctggcccaacgggagccagcgcggcaccgatctctctggcgctgaatgccgaaagcaacaacgtcatgatgctgacacacgctatcacgcgttacggcatctctaccgacgatccgaataaatggcgttactacctcgatagcgtagaagtccacctgccccctttctgggaacagtacatcaacgatgagaataccgttgaactgattcataccgatagcctgccgctggttattagtctcaacggtcatacgctgcaggagtacatgcaggaaactcgcagctatgccttgcaacctgttccgagtacgcaggcgagcattcgcggggaagagagtgagcaaatcgagctactcaatattcgcaaagaaacgcatgaagaatatgcgctgagtcgtccgcgcgggctgcgtgaagcgttgctgatcgtcgcctccttcctgatgttctttttctgcctgattaccccggatgtatttgttccgtggctggcaggcggcgcgttactgctgctgggcgcaggtctgtgggggctattcgcgcccccggcaaaatcctccctgcgggaaattcattgtctgcgcggtacaccccgtcgttggggattgtttggcgaaaacgatcaggaacagatcaacaatattagtctcggtattatcgacctggtctatcccgcacactggcagccatacattgctcaggatctcggtcaacaaaccgatatcgatatctatctcgaccgccatgtagtgcgtcagggacgatatcttagcctgcatgatgaagtaaaaaactttccgttacagcactggctgcgcagtacgattatcgctgcgggcagcctgctggtgctgtttatgctgttattctggatcccgctggatatgccgctgaaattcactctcagttggatgaaaggcgcgcagaccattgaagccactagcgtaaaacaactggctgacgctggcgtgcgggtaggcgatacattgcgtattagcggtacgggaatgtgtaatattcgaacttccggaacctggagcgcgaaaaccaatagtccttttttaccgtttgactgcagccagatcatctggaacgacgcccgcagtttgccattaccagaatctgaactggtcaacaaagcgacggcattgactgaagcagttaatcgccagctgcaccctaaaccggaagatgaatctcgcgtcagtgccagtttacgtagtgcaattcaaaaatccggcatggtattgcttgatgattttggcgacattgtactgaagacagcggatttatgttctgccaaagatgactgtgtgcgactgaaaaatgcgctggtcaatctcggcaacagtaaagactgggacgcgctggtaaaacgcgccaacgccgggaagctcgatggcgtgaatgtgttattacgcccggtgagtgcggaaagcctggataacctggtggcaacctccaccgcgccgtttatcacgcatgaaacggcgcgagcggcacaaagtctaaacagtccggcccccggcggattcctgattgtcagcgacgaaggcagcgattttgttgatcagccctggcctagcgcaagtctttacgactacccgccgcaagaacagtggaacgctttccagaaactggcacaaatgctgatgcatacgccgtttaacgccgagggtatcgtcacaaaaatcttcactgacgccaatggtacgcagcatattggccttcatccgatcccggatcgttccggcctgtggcgctatctcagcaccacattgctgctactgacgatgctgggtagcgccatttacaatggcgtacaggcctggcgtcgttaccagcgtcatcgcactcgcatgatggagattcaggcctattatgaaagctgcctgaacccgcaactgatcacccctagtgaaagccttatcgaataacacgtttgcgcggcaggttatgctaccctgtcgcgcaaattgcttcactctggagatttccctcatgcatatcaacattgcctggcaggacgtagataccgttctgctggatatggacggcacgttgctcgacctcgccttcgataactatttctggcaaaagctggtgcctgaaacatggggcgcgaaaacggggttacgccacaggaagcgatggaatatatgcgccagcaatatcacgacgtacagcatacgctaaactggtactgtcttgattactggagtgagcaactgggtctggatatctgtgcgatgaccaccgagatgggaccgcgtgccgtactgcgtgaagataccattccgtttcttgaggcactgaaagccagcggtaagcagcgaattttgctcaccaatgcgcatccgcacaacctggcggtaaaacttgagcataccggtctggacgcacaccttgatttattactttccacccacacatttggttatccgaaagaggatcagcggttatggcatgcggtggccgaagctacgggtctgaaagctgaaagaacgctgtttattgatgacagcgaagcgattctcgatgctgccgcgcaatttggtattcgttactgcctcggcgtgactaatcctgattccgggattgccgagaaacagtatcaacgccatccgagtctgaatgactaccgccgcctgatccccagcctaatgtgaaggagacgccatgaaagagaaacctgctgttgaggttcgactggataaatggctatgggctgcccgtttttataaaacccgcgcgctggcccgtgaaatgattgaaggcggtaaggtgcattacaacgggcagcgcagcaagccgagcaaaatcgtcgagctgaatgccacgctcactctgcgccagggaaatgacgaacgcacggtgattgtaaaggcgattactgaacagcgtcgccccgccagcgaggcagccttgctgtatgaagagactgcggaaagtgtagagaaacgcgaaaaaatggcgctggcacgtaaacttaatgccttaaccatgccgcacccggaccgacgcccggacaaaaaagagcgccgcgacctgttacgatttaaacacggcgacagtgaataactgtcacctgcaagagagatgattatgccgcaacatgaccaattacatcgctatctgtttgaaaactttgccgtgcgcggcgaactggtaaccgttagcgaaaccctgcaacagatccttgagaaccacgattatccgcagcccgttaaaaacgtgctggcagaactgctggttgcgaccagcctgttaaccgctacgctgaagtttgatggtgatatcaccgtacagctgcagggcgacggtccgatgaatctggcggttattaacggtaacaataaccagcagatgcgcggtgtggcgcgcgtgcagggcgaaattccagaaaatgccgacctgaaaacgctggtcggcaatggttacgtggtgatcaccattaccccgagcgaaggcgaacgctatcagggcgtagttggtctggaaggtgataccctggcggcctgcctggaagattactttatgcgttctgaacagctgccgacgcgcctgtttattcgcaccggcgacgtagacggcaaaccggctgcaggcggtatgttgttgcaggtaatgcctgcgcaaaatgcccagcaggacgactttgaccacctggcgacgctaaccgaaaccatcaaaaccgaagaactgctgaccttaccggcaaacgaagtgttgtggcgtttgtatcacgaagaagaggtgacggtttacgatccgcaggatgtggagttcaaatgcacctgcagccgtgaacgttgcgccgatgcgctgaaaacgctgcctgatgaagaagttgatagcatcctggcggaagatggcgaaattgacatgcattgtgattactgcggtaaccactatctgttcaatgcgatggatattgctgaaatccgcaacaacgcgtctccggcagatccgcaagttcattaatgagtatgtccggcagagagggctctgccggattttacgactaatacacctgatgcgctttgtcactcattcagattcacattcagcctttcaccatccactacaagatcgcgccacgctttaggcttcgtccccagttttccatccttcgcagctgtgagtaatttttctttcgttatttcgttcggaagtaaactcatatcaagcgcgtcccattcttttctgtcactgtcaaagccatagacaatgactctgtcatcattaaaagcaaacaggatccgctccgcctgaccatcactattcagatcttgctcgaccaggacgcaggcgtctttttcaatacaggtcatcacgttatagcgatcctggattaaggcgctccagaatgtcgcatcaggtttaacagaaccaggggcaattaacacattatcggctaatactttttcgcttacctgttgctgaagatgttgctctccatctaacgccatcagcagatcccgcgcgcgtttcgggtctttcataaacccggcatcgcttttcaggctctcaagcgcagcacgtccatagcgaccgctctgctcgagcatgtagatagttacctggtcactcgtgtttttgccgctctgataacgcgccatatggctgttcacgctaatgcgcatactgtccagcaccgggctattaagaagcaccagtatcaccaacaccaataagctaaccgcaaggttcactttgccctgaagaacaacgggattttgccctttacgccagacgatgctgacaaaataccccaggctccacaccagtaacaccagcaccgccagcacgccctgcaagcggtcgacagtccagccgtactgagcgacccgcagccataacgcccaggcggcgacgaacacatacagcggagcaaccagcaaagcggttttaatcaggcaacgcaacggccctgtccagggaagactcgctttttgcggatcgcggacaatagccattaagatcaattgcaaaaaggccagcgtcaacagcaacccggcggcggagatgtggcgagaaatcgcgctcaggcccgtaaacggcagggtgatgataaacatcagggttagcaaacttactaacggcagcaaccccgtggcgattaacgtgaacaacttttgaatagagtcgattaaacgactctgtgttcgcgcgaggatcaccgccagcgcggtaaccagacctaacgtgagataaataaaccagtcggttgcaaaaaagagcgtattgaaaaacgtgatgccaacaagtttaaacaactcactccacagtaaaagcaccagccacgtcaagccattggcgagaaaaatcaccagtaatataagtacgttatgccatacactctggtaaaaatagcgatagcggctactgtcattgcggatgcgaaggctttgttgtatccacggtagcaacaacattgccatcaacagcagatagcaaccaaaatcccaaagcgccttttcagctctccaggggttcatgccatcagtttgccacttcagccagccgctcatccccagcgtggcaataaacactagcgccagccatccccaaaggcgcttctgtttaaaagagatcacggagaagagtaaaacggaactaaacgcgacggtcgcaggcacgccataaacaatccaactgtgattttttccggaaagccaggcgatcagcaggtagcaaaccagaccctgaagtaatccggtagcaatcatcccccagcgtgttgcgggactaagttcaacgttatccatgttggttatccagaatcaaaaggtgggttaattatcgcatccgggcagtagtattttgcttttttcagaaaataatcaaaaaaagttagcgtggtgaatcgatactttaccggttgaatttgcatcaatttcattcaggaatgcgattccactcacaatattcccgccatataaaccaagatttaaccttttgagaacattttccacacctaaaatgctatttctgcgataatagcaaccgtttcgtgacaggaatcacggagttttttgtcaaatatgaatttctccagatacgtaaatctatgagccttgtcgcggttaacacccccaaaaagactttactattcaggcaatacatattggctaaggagcagtgaaatgcgcgttaacaatggtttgaccccgcaagaactcgaggcttatggtatcagtgacgtacatgatatcgtttacaacccaagctacgacctgctgtatcaggaagagctcgatccgagcctgacaggttatgagcgcggggtgttaactaatctgggtgccgttgccgtcgataccgggatcttcaccggtcgtagtccaaaagataagtatatcgtccgtgacgataccactcgcgatactttctggtgggcagacaaaggcaaaggtaagaacgacaacaaacctctctctccggaaacctggcagcatctgaaaggcctggtgaccaggcagctttccggcaaacgtctgttcgttgtcgacgctttctgtggtgcgaacccggatactcgtctttccgtccgtttcatcaccgaagtggcctggcaggcgcattttgtcaaaaacatgtttattcgcccgagcgatgaagaactggcaggtttcaaaccagactttatcgttatgaacggcgcgaagtgcactaacccgcagtggaaagaacagggtctcaactccgaaaacttcgtggcgtttaacctgaccgagcgcatgcagctgattggcggcacctggtacggcggcgaaatgaagaaagggatgttcagcatgatgaactacctgctgccgctgaaaggtatcgcttctatgcactgctccgccaacgttggtgagaaaggcgatgttgcggtgttcttcggcctttccggcaccggtaaaaccaccctttccaccgacccgaaacgtcgcctgattggcgatgacgaacacggctgggacgatgacggcgtgtttaacttcgaaggcggctgctacgcaaaaactatcaagctgagcaaagaagcggaacctgaaatctacaacgctatccgtcgtgatgcgttgctggaaaacgtcaccgtgcgtgaagatggcactatcgactttgatgatggtagtaaaaccgagaacacccgcgtttcttatccgatctatcacatcgataacattgttaagccggtttccaaagcgggccacgcgactaaggttatcttcctgactgctgatgctttcggcgtgttgccgccggtttctcgcctgactgccgatcaaacccagtatcacttcctctctggcttcaccgccaaactggccggtactgagcgtggcatcaccgaaccgacgccaaccttctccgcttgcttcggcgcggcattcctgagcctgcacccgactcagtacgcagaagtgctggtgaaacgtatgcaggcggcgggcgcgcaggcttatctggttaacactggctggaacggcactggcaaacgtatcagcattaaagatacccgcgccattatcgacgccatcctcaacggtagcctggataatgcagaaaccttcactctgccgatgtttaacctggcgatcccaaccgaactgccgggcgtagacacgaagattctcgatccgcgtaacacctacgcttctccggaacagtggcaggaaaaagccgaaaccctggcgaaactgtttatcgacaacttcgataaatacaccgacacccctgcgggtgccgcgctggtagcggctggtccgaaactgtaatgatttgaagctggagaatatctatccagtatcttatagaaagcaaaacgggaggcaccttcgcctcccgtttatttacccttcttttgtcgtgccctgcgcccgcgttaccggcactggcagccaggcgcgaatggaaagcccgccccgctcgctggtgccaagctccagcatcccgttatggttatccacgatacgctgcacaattgccagccctaatcccgtgccgctaatggtgcgcgcactgtcgccgcggacaaacggctggaacaggtgcttacgttgttccggcgcaattcccggaccgtcatcttccacctggaaccaggcgcgattcggctccgttccgctgctgactttgatccagccattgccataacgggcggcgttgaccaccatattcgccaccgcgcgtttgatgctcagcgggtgcattttcacttcaatgctgccggggtaaagcgcggtttcaatttcccgctcatagccactttcggcagcaatcacctcaccgagtactgcattaagatccgccatttccatcggcatctcctgcccggtgcgcaggtagtcgataaactgctcaatgatggcgttgcactcttcgatatctttattgatgctttctgccagatagccatcctgctcgctcatcatctcagtcgccaggcgaatacgcgtcagcggcgtgcgcaagtcgtgacttacccccgccatcagcagcgtgcggtcatccgccagttgcttaacaccagccgccatatggttaaaggcacgggtaacggaacgcacctcgctagcgccatactcacgcagcggcggcggaataatccctttaccaacctgcaaggctgcgtgttcgagatcgaccaacggtcggttctggatacgaataaacagccacgccccgcctatcgccaatagcataatcgccagcgtatagcggaacagcggagagaaatcgccctgatgaatttcggtcagcggcacgcgtacccagatattggggctcagccaggttttcagccagacgacagggctacttttgttgacctcaacgcgcacttccgtcgggccgcccagttgctgcgccatctgatggcttaagaattcatagtgttgcgcccaacgcagacctgcctcttcggcagcctcgttggagtagagagagatccccagctcacggtagatctcccgacggaaagcgggaggcacaaccaactgcgtgccgtcctccagttgcagtttgtcggtcatcaacatacgcacttcgtacgcgaggactttattaaactgctggaggctcggcaaaatcgcgaagttcagcaccaccagataagtcgtcaccaggctggcgaacagcaaggtgacgatgagcaataacgtacgggcaaaactacttcgtgggctgaagcgcaatcgcctcatgctttagagccgtccggtacaaagacgtagcccagaccccagacggtctgaatgtaacgcggatgcgctggatcttcttccaccatgcggcgcagacggctaatctgcacgtcgatggagcgttccattgcggaatattcacgaccacgggcaaggttcatcagcttatcgcgggagagcggctcacgcggatggctgaccagtgccttcagtaccgcaaactcaccgctggtgagcggcatcggctcgtcttcgcggaacatttcgcgcgtaccgaggttaagtttgaacttaccgaaagcaattaccgcctcttcctgactcggtgcgcctggcagttcgttcgcctgacgacgcagcaccgcacggatacgggccagcagttcacgcgggttaaacggttttggaatgtagtcgtcagcgccaatctccaggcctacgatacggtccacttcttcccctttcgccgtcaccataatgatcggcatcgggttgctctgactacgaagacgtcggcaaatgctcaagccatcttcaccaggtaacattaaatccagtaccataagatggaaagattcacgagtcagcaggcgatccatctgttctgcattagcgacgcttcgaacctggaagccttgttcggtgagataacgttccagcagcgcacgcaggcgcatgtcgtcatcgaccaccagaatcttgtagttctcttgcattgtttgtactcccaaaggttcgcaacaatttgtaagcgtgtattcttaaaaaagctcacgttcgtcaccagctaaatctggtatgaatttcagcctaaattgttacaaagcatattaaacagcagcttaagtatacaatttattcggcgaaacattattgattctgttgatatgatcacgttatacccaatgtgcgcattatcaaacagacaaagggaatcaacgagatgaaaacgcccctggttacccgggaagggtatgaaaaactcaaacaagagcttaattatctctggcgtgaagaacgcccggaggtcacaaaaaaggtgacctgggccgcaagtctgggcgaccgcagcgaaaatgctgactatcagtataataaaaagcgtctgcgtgaaatcgaccgtcgcgtgcgctatctcactaaatgcctggaaaatctcaaaatcgtcgattactcccctcagcaggaaggcaaagtcttttttggcgcgtgggtggagattgaaaacgacgatggcgtgactcaccgtttccgtattgtcggctacgatgaaatttttggccgtaaagattacatctctatcgattccccgatggcccgcgcattgctgaaaaaagaagtcggcgatctggcggtggtgaatacccctgccggggaagcgagctggtatgttaatgctatcgagtacgtgaaaccgtaaggaagagtcttaacctcctgccgatggctggcatttttgccagccagtccgtataactatcccctgatttttgatccgaaaagatgaactcaaaccatgatgaatgatagcttctgccgcattattgcgggtgaaattcaggcgcgcccggaacaggttgacgctgccgttcgcctgcttgacgaagggaataccgtgccgtttatcgcacgttatcgtaaggaaatcaccggcggtctggatgacacgcagctgcgtaatctggaaacgcgtctgagctatctgcgcgagctggaagagagacgtcaggcgatcctcaagtccatttccgagcaaggcaaactcaccgatgatctggcgaaggccatcaacgccaccctaagcaaaaccgaactcgaagacctctacctgccctacaaacctaaacgccgcacccgcgggcaaatcgccattgaagcagggcttgagccgttggctgacctgctgtggagcgatccgagtcacacgccagaagtcgccgctgcacaatatgtttatgccgataaaggcgtggcagataccaaagccgcgctggatggcgcgcgctatatcctgatggaacggtttgccgaagatgccgcgctgctggcgaaagtgcgtgattatctgtggaagaacgcgcatttggtttctacggtggtgagcggtaaagaagaggaaggggcgaaattccgcgactatttcgatcatcacgaaccgttgtccacggtgccttctcaccgcgcgctggcgatgttccgtgggcgtaacgaaggcgtacttcagcttagcctgaatgccgatccacagttcgatgagccgcccaaagagagctattgcgagcaaatcatcatggatcaccttggcctgcgcctgaacaatgccccggcggatagctggcgcaaaggcgtggtgagctggacgtggcgcatcaaggtgctgatgcatctggaaaccgaactgatgggcaccgtgcgcgaacgtgcggaagatgaagcaatcaacgtctttgcccgtaacctgcacgatctgctgatggcggcccctgccggactgcgtgcaacgatgggcctcgatccgggtctgcgtactggggtaaaagtggcggtggtcgatgccactggcaaactggtggcgaccgacaccatttacccgcacaccggacaggccgcaaaagcagcgatgaccgttgctgcgctgtgtgaaaaacataacgttgaactggtagcgatcggtaacggtacagcttcccgcgaaactgagcgtttctatctcgatgtgcagaagcagttcccgaaagtgaccgcgcagaaagtaatcgtcagcgaagcaggcgcgagcgtttacagcgcttccgagctggctgcacaggagttcccggatctcgacgttagcctgcgtggcgcggtgtctatcgcccgccgtttgcaggatccgctggcggagctggtgaaaatcgatccgaaatctatcggcgtaggtcagtatcagcatgacgtcagccagacgcaactggcccgcaaactggacgcagtagtagaagactgcgtaaacgccgttggcgtcgatctcaacactgcttctgttccgctgttaacccgcgtggcgggcctgacgcgcatgatggcgcaaaacatcgttgcctggcgcgatgagaacggtcagttccagaaccgtcagcaactgttaaaagtgagccgtctggggccgaaagccttcgagcagtgcgcgggcttcttgcgcattaaccacggtgataacccgctggacgcgtctaccgttcacccggaagcctatccggtggtggaacgcattctggcagcaacacagcaggcactgaaagatctgatgggtaacagcagcgaactgcgtaacctgaaagcgtctgactttactgatgagaaattcggtgtgccgacggtaaccgacatcatcaaagagctggaaaaaccgggtcgcgatccgcgtccggaatttaaaaccgctcagtttgccgatggcgtcgagacaatgaacgacctgcaaccgggtatgatcctcgaaggcgcagtgaccaacgtcaccaactttggcgcgtttgtcgatattggcgtgcatcaggacggcctggttcacatctctagtttgagcaacaagtttgtggaagatccgcataccgtggtgaaagcgggcgacattgtgaaggtgaaagtgctggaagtggatcttcagcgtaaacgtatcgccctgactatgcgcctggatgagcagcctggcgaaaccaacgctcgtcgcggcggcggtaatgaacgcccgcaaaacaaccgcccggcagccaaaccacgcggtcgtgaagcgcagcctgccggtaatagcgcgatgatggatgcgctggcggcggcaatgggcaaaaaacgttaaacgcccgtactggcctacggttcgaatttgcacgaaatcgtagggcagataaggcgttcacgccgcatctggcaacgaacgccttgcctgacataaaagtgccggagaatatctccggcatttttattccacagccaaactcataatatattccggcaatatttatcatttcattaacaactgaaaccttaattaaacattagccagtccgggtaattcactattcgaattatattttcgctgcgatataaccttgagccacatcaacattgagtcagattattattcaaaccaacattcgcacacattttaagtattgctgatagaaaccattctcattatcattgtgttgttgattatttaatctctcctttgttggcaaatcatctggtctcatgtcgctgtcaaacgccccatgaggtagttatccagttaatgagaaacaagtaggcacctatgcaatacactccagatactgcgtggaaaatcactggcttttcccgtgaaatcagcccggcatatcgccaaaaactgctttctcttggcatgttacctggctcctcttttaatgtggtgcgcgtcgctccactcggcgaccccattcatatcgaaacccgtcgtgtgagcctggtattacgcaaaaaagatctggccttattagaagtggaagcggtttcctgttaatacggtgataacaacaatgaaaaaattaaccattggcttaattggtaatccaaattctggcaagacaacgttatttaaccagctcactggcagtcgtcagcgtgtaggtaactgggctggcgttaccgtcgaacgtaaagaagggcaattctccaccaccgatcatcaggtcacgctggtggacctgcccggcacctattctctgaccaccatcagtagccagaccagcctcgatgagcaaatcgcctgtcactacattttgagtggcgacgccgacctgctgattaacgtggtggatgcgtctaaccttgagcgtaacctgtacctgacgctacaactgctggaactcggcattccctgcattgtggcactgaacatgctcgacattgccgagaagcaaaatattcgtattgaaattgatgctctgagcgcgcgtctgggctgtccggtgatcccgctggttagtacccgtggtcgcggtattgaagcgctcaagctggcgattgatcgctataaagctaacgagaatgtggaactggtgcattacgcacagccgctgctcaacgaagcagatagtctggcaaaagtgatgccttccgacatcccgctgaaacaacgtcgctggctgggcctgcaaatgctggaaggcgatatctacagccgcgcctacgccggtgaagcgagccagcatctggatgccgccctcgcccgtctgcgtaatgagatggacgatccggcgctgcacattgccgatgcgcgttaccagtgcattgctgccatctgtgatgtggtaagcaacaccctgacggcagaacccagccgtttcaccactgcggtagataaaatcgtgctcaaccgtttcctcggtctgccgattttcctctttgtgatgtacctgatgttcctgctggctatcaacatcggcggggcgttacagccgctgtttgacgtcggctccgtggcgctatttgtgcatggtattcaatggattggctacacgctccacttcccggactggctgactatcttcctcgcccagggcctgggtggcggcattaacaccgtgctgccactggtgccgcagattggcatgatgtacctgttcctctccttccttgaggactccgggtatatggcgcgtgcggcgtttgtgatggaccgtctgatgcaggcgctgggcttgccggggaaatcctttgtgccgctgatcgtcggtttcggttgtaacgtaccgagcgtaatgggtgcacgtacgcttgatgcaccgcgtgaacgtctgatgaccatcatgatggcaccgtttatgtcctgcggcgcgcgtctggctatcttcgcagtattcgcggctgccttcttcgggcagaacggtgcgctggcggtcttcagcctgtatatgctgggtattgtgatggcggtgctgactggcctgatgctcaagtacaccatcatgcgcggtgaagcgacgccgtttgtcatggagttgccggtctatcatgtaccacacgttaaaagcctgattatccagacctggcagcgtctgaaaggcttcgttctgcgtgctggtaaagtgatcatcatcgtcagcattttcctgagcgctttcaacagcttcagcctgagcgggaaaatcgtcgataacatcaacgacagcgcgctggcgtccgtcagccgggtgatcaccccggtcttcaagccaattggcgtgcatgaagataactggcaggcaacggttggcctgtttacaggtgccatggcgaaagaagtggtagtgggtacgctcaacaccctctacaccgcagaaaatattcaggacgaagagttcaatccggcagaatttaacctcggtgaagagctgttcagtgcgatagatgaaacctggcagagcctgaaagacaccttcagccttagcgtactgatgaaccccattgaagccagcaaaggcgacggcgaaatgggtaccggggcgatgggcgtgatggatcagaaattcggtagcgcagcagcagcttacagctacctgattttcgtcctgctgtatgtaccatgtatcagcgtgatgggggctatcgcccgtgaaagtagccgtggctggatgggcttctccatcctgtgggggctgaatatcgcttacagtctggcaacattgttctatcaggtcgccagctacagtcagcatccaacttacagcctggtgtgcattctggcggttatcctgtttaacatcgtggttatcggtctgctgcgccgcgcgcgtagccgggtggatatcgaactactggcaacccgcaagagcgtaagcagttgctgcgcagccagcaccaccggtgattgccattaatggctagtcttattcaggtgcgcgatttgctggcgttacggggccgtatggaagcggcccagataagccagacattgaacactccacagccaatgattaacgccatgctgcaacaactggaaagtatgggcaaagccgtgcggattcaggaagaacctgacggctgcctctctggcagttgtaaaagctgcccggaaggaaaagcctgtctgcgcgagtggtgggcgctgcgttaaccttactccatcgcctgttttggaaagcccggtatgcgtctgcatccgggcttttttgcgtgcggctttccataaaaatgcaactcttgcagcacggcgtaagttcctttgaaagcatctcgcagggatgaaaactcgctaatacacaggtgtggagtggcgcgtagagtcgcggcattcaaacaacaggtgaaggaacgccatgagcaaaaagcagagttccaccccacacgatgcgctgttcaaactctttttacgccaaccggacacggctcgtgattttcttgcgtttcatttaccggcacccattcacgcgctttgtgatatgaaaaccctcaagctggagagcagcagctttattgatgacgatctgcgtgaaagctattccgatgtgctgtggagcgtgaaaacggaacaaggaccaggatacatctattgtctgattgaacatcaaagcaccagtaacaaactgatcgcatttcgcatgatgcgttacgctattgccgcaatgcaaaatcaccttgatgctggatacaaaacgttgccgatggtggtgccattgttgttttaccacggtattgaaagcccctatccctatagcctgtgttggctggattgtttcgccgatcccaaactggcaaggcagctttatgcctccgcatttccgctgattgatgtcaccgtcatgcctgatgatgaaatcatgcagcaccgacgtatggcgctgctggagttaattcaaaaacatattcgtcaacgcgacctgatggggctggtagagcaaatggcctgcttattaagtagtggatacgctaatgacagacaaatcaaagggctgtttaattacatactgcaaactggcgacgctgtacgttttaacgattttatcgacggcgttgccgaacgtagtccgaaacacaaggagagtttaatgactattgcggaaagattgcggcaggagggggaacaatccaaagccctgcatatagccaaaataatgcttgaatccggagttcctcttgcagacatcatgcgctttaccgggctgagtgaagaagagttggctgcggcgagtcagtaaagttctgtctcgccatttcaaaagccacttacaccctctgcttcaacgccaccagcaggtgacaaaactcggccggatggctaataaatggcgcatgggccgctttggcgaagatataactttcgctgtgaggccaaagtttatccagcatcggcaccactttgcgcggcaccagaccgtcgagatagccatacaatcgcaaaaacggcatggacacgttttgcagcggctgacggagatcgaccgttttcaggatttccagcccgccattaagcacgtcaacctccggcatcggtaacgccagaacggttttcttcaacgcccgcgcatcctggcgcgccgtttcagtccccatggtttgtaacgccaggaaccgctccactgtacgctgaaaatcatcactgagttgctgctgaaatcccgccagcacgtccggtcttatccccggccactcgtcacgagcactaaaacaaggactgctcgccacggtgaccagcgcctgaacacgctcgggatgggttaacgcaatctggcttgccaccagcccgcccagactccagcctaaccaaatggctttatcaggtgcctgttgcagcacggcttcggccatatcagcaagactcagcgcaccaaatccccggctacgcccgaagccgggcaggtcaacaaggtgcagcgtaaaatggctgctaagttcctcgtcaatgcaacgccacacttcggcattcagtccccatccgtgcagcagcacaagatgaacattcccctgacctttggtctgccaccagatgttattcatccgctattgttctcttttgacttacaaggatgaacatatgctaacagtaccgggattatgctggctatgccgaatgccactggcgttaggtcattgggggatttgtagcgtctgtagtcgcgccacccgcacagataaaacgttatgcccacaatgtggattacccgccacacactcccatcttccctgcggtcgctgcctgcaaaaaccgccgccctggcaaagactggtcacggttgccgactatgcgccgccgttaagtccgcttatccaccagcttaaattttcccggcgcagtgaaatcgccagcgccctgagtcgtctgttactattggaagtcttacacgctcgtcgcaccaccgggttgcaattgccggatcgcatcgtcagcgttccgttatggcagcggcgtcactggcgtcggggatttaatcagagcgatttgctgtgtcagccgttaagtcgctggttgcactgccaatgggatagcgaagccgtcacacgtacacgggccactgcgacccagcattttctcagtgcccggctgcgcaagcgcaacctgaaaaatgcctttcgtcttgaattgcccgtgcaaggtcgccatatggtgattgtggatgatgtcgttaccaccggaagtaccgtcgcagagattgcgcagttgcttttacgcaatggtgcggcggctgtccaggtctggtgcctttgtcgaaccttgtaaagcctcgatgatgggcgtattataaccaactaaaatagtcaactattaggccattactatgatccgtatttccgatgctgcacaagcgcactttgccaaactgctggcaaatcaggaagaagggacacaaatccgcgtatttgtgattaaccctggcacgcctaacgctgaatgtggcgtttcttattgtccgccggacgctgtggaagccaccgacacagccctgaaatttgacctgctgaccgcgtatgttgatgagttaagcgcaccatacctggaagatgcagagatcgattttgttaccgaccagttgggttcccagttaacgctgaaagccccgaacgccaaaatgcgtaaagtggcagacgatgcaccgctgatggagcgcgtggagtatatgctgcagagccagatcaacccacagcttgctggtcacggtggtcgcgttagcctgatggaaatcaccgaagacggttacgccattctgcaatttggcggtggctgtaacggttgttccatggtcgatgtgacgctgaaagaagggatcgagaagcagctgctgaacgaattcccggagctgaaaggtgtgcgcgatctcaccgaacaccagcgcggcgaacactcctactactaagttatcccctcttttgtagattgcccgatgcgacgctaaagcgtcatttcgggcctacgttgaacatgtgccagacgttggcgcagcattgctttgtcaaatcctcggttcgtttccccgcgataatatgaccaacctctcataatttaaatttaccccgctctggtgattctcaaacgccagatgttacccgtatcattcacatgggtaccaaacatactcctgacatctgactacaataattagttttagtgggtatcagtcgtggtgccgcaatatctctgttcccgattgggataattagagtttgtcgtcagaaaattgacgttacccataacaaatgaaaggccaggtaaatcatgccattagtcattgttgctatcggtgtaatcttgttgttgctcctgatgatccgcttcaaaatgaacggcttcatcgctctcgtcctcgtggcgcttgctgttggattaatgcaaggaatgccgctggataaagttattggctccatcaaagccggtgtcggcgggacgctcggtagccttgccctgatcatgggttttggcgcaatgctgggcaaaatgctggcagactgcggtggcgcacaacgtatcgccaccacgctgattgccaaatttggtaaaaaacacatccagtgggcggtggtactgaccggttttaccgttggttttgccctgttctatgaagtgggctttgtgctgatgctgccgctggtgtttaccatcgcggcttctgcgaatattccactgctgtatgttggtgtaccaatggcggctgcactgtctgtgacccacggcttcctgccaccgcatccgggtccgactgcgattgccaccattttcaatgccgatatgggtaaaaccctgctgtacggtactattctggcaatcccgaccgtgattctcgccggtccggtttacgctcgcgtgttgaaaggtatcgataagccaattccggaaggtctctacagcgcgaaaaccttcagcgaagaagagatgccgagctttggcgtcagcgtctggacctctctggtgccggtagtactgatggcgatgcgtgcgattgccgaaatgatcctgccgaaaggtcacgctttcctgccggtagcggagttcctcggtgacccggtaatggcaacgctgattgccgtgctgattgcgatgttcacctttggtctaaaccgtggtcgtagtatggatcagattaacgacacgctggtttcttccatcaaaatcattgcgatgatgctgttgatcatcggtggtggcggtgcgttcaagcaggtgctggtagacagcggcgtggacaaatacattgcttccatgatgcacgaaaccaacatttctccgctgctgatggcctggagcattgctgccgtactgcgtatcgcgctgggttccgcaaccgttgcggcaatcactgcgggtggtatcgcggcaccgctgattgcaacgacgggtgttagcccggagctgatggttattgcggttggttccggtagtgtgattttctctcatgtgaacgatccgggcttctggctgttcaaagagtactttaacctgactatcggcgagaccatcaaatcctggagcatgctggaaaccattatcagcgtgtgcggtctggtaggctgtctgctgctgaatatggtgatttgataacactgactgccggatgcggcgtgaccgccttatccggcctacgattcgggatgaattagtaggccggataagacgcgtcaagcatcgcatccggcatcaaccgcactttacttcttcttcgctgcagctctgcgccgtctgtccaaatccttcagcaacttgttcacgccatcatcggcaaacatgctctcaagcgttgcggaaagcttgcgtcgccagtttttatactggtaactggtgccaggaatattcaccggttcggccatatccagccagtcttccggctgtagtcctaacagagcactgttactgtcggcaatgtagcgctgcaaaccacggttcagcgtcggcgtcatgctcatcaagcttgccttatgcccggcacgtttcggcagacaaccatatttatgcagtgcatccagcagcccttgcttcgccagttcgcgatcctgatacagaccgcgcagtaccacttcatccggatacagccccagggttttgcccagcgttagatccccgcactcccagtaaccgcgcagcgttggcaggtcatgtgtcgccgcaaccgccatgctctgctccggatacgctttcggtgcacggaacgtcttctcgtggtcgttttcgaaatagagcactttgtaagagtacacaccgctgctgcgcagcttaccgacaatctctaccggtacggtaccgagatcttcaccaatcaccatacagcgatgacgtttactttcgagtgccagaatgctgagcagatcatccaccggatagtgaacatacgcgccctgatctgccgtctcgccatacggtatccaccacaaacgcagcatgctcatcacatggtcaattcgtaatgcgccgcagttttgcatattggcacgcaacagctcgataaacggttcataggcacgcgcggtgatgatatgcgggtccattggcggtaatccccagttctgccccaacgggccgaggatatccggcggcgcgccaacgcttgctttcaggcaatatagttcacggtcacaccaggtttccgccccaccttccgctacgccaaccgccagatcacgatacaagccaatcggcatttcatagccctggcttatctcccagcaggcggcaaactggctgtaagccagccactgcaaccagagataaaaatcgacgtcatcacgatgttcttcgcagaactgacgcacttctggactatccacgttctgatacatctctggccatgcaggccagccccagcgcatttcgtcctctttcacttgctgggcatgtagcgcatcaaaggctgcctgccagaacaggctgtcgccctgctctgcaacaaactggcgaaacgcggccatctgctcatcatcacgttgcgcgaaacctttccacgccattcgtaatgctgtcatttttagggcggtaaccgtggagtaatcgacccagtcggcatcgcgcgcctgttgcagcgtctgttgcgtggtcggcaactgccaccaggcctgagcctcttcgctaagatggaaatcttcaacggcgttaacgtcgatataaatcacattcagccaacggcgagaagacgggctgtatgggctggcgctctccggatttgccggatagagcgcatgaatcgggttcaggccaatgaagctcccgccacgttttgccacatccaccagcatcgctttgagatcgccaaaatccccaataccccagtttttttcgcttcgcagcgtataaagctgaacgcaggcaccccacagcttttgtttattcagcaacgcctgcggttcgtaacagcgtttcggggcgacaatcacccggcaatgcgcgcgctggtcgtcctgggtgagtgtcagcgtgtgataaccttccggcagcttcgtcggtagattgaacgctttgccccccgttacatggcctttgtactgcgttccttcttcggtggtcagcagccagctatattcgccgctgccctccaccaccatcggcatttttttgccgctggtataaaccatgacattcgggactggcgttaccgccactttcgtggcggtacgttgatgcatcgcgtcaagcaaacgccgtttggtttcggcgctaatgctctgcggtttaccgtgggcattgatgtaattggggctaatccccgccgccagcgcggcattatccagacgtttgctttccatcgagcttccttagcgttttgcctgccagatacgagcctgataatcgcgaatagagcgatcgctgctaaacataccgcagcgggcggtattgaggatcgccgcgcgagtccaggcctcctggtcgcggtacagcacatccacctgcttttgtgcctctacataggctgcgaaatccgccatcaccagatacggatcgccgccctgtttgccgatactgtgcagcatctagtcgaaggcatgcttatcgccgtcgctgtatttaccgctttccagctctttcaatactgcgtccagcaccttatctttcttccgccatttcaccgggtcgtagcctttggccagaattgccttcacttgttccacggtatgaccaaaaataaagatattttcttcaccgactttctcggcgatttcaacgttcgccccatccagcgtaccgacagtaagcgcaccattgagcgccagtttcatattgccggtaccggaagcttctttacctgcagtgctaatttgttcggagatatccgccgccgggatcagtttttccgccgcgctaacgcaataatccggcaggaacaccaccttcaacttatcgccaaccagcggatcgttgttgatcacgtcagccactttgttgatcgcaaagataatattcttcgccaggtagtagcccggtgccgctttcgcgccgaagaggaagacgcgcggtacgcgatcagcctgcgggttttcacgaatttctttgtacaacgccagaatatgcagcagattcaggtgctggcgtttgtactcatgcaaacgtttgatctgaatatcgaaaatcgcctgtggattgatctcaataccggtacgaactttcacaaactccgccagacggactttattcgcctgcttgatctcgcgatattgctgacggaatttcgcatcatcagcgaatttttccagattgatcagctgatcgagatcgttagcccactctttttgcagacttttatccaacagagccgccagtgccgggttgcactgtttgatccagcgacgtggggtaataccgttggtgacgttatggaatttgttcggccatagctggtgatattccgggaacagatctttcaccaccagatcgctgtgcagcgccgcaacaccgttcaccgcgaaaccgccaaccacacacaggttcgccatatgcacttgtttgtcgtgcaccaccgccagtttggcccacactttttcatcgcccggccaggttttctctaccagcgttttaaagcgagtattaatttcgttaataatctgcatgtggcgcggcagtaagcctttcaccagtttcacatcccagcgttccagcgcttctggcatcagggtatggttggtgtaagcgaaagttttgctggtaatggcccaggcgtcatcccagctcatctggtgctcatcgatcagcacgcgcagcagttctggaatcgcgatagttgggtgggtatcgttcagctgaataacttcgtaatccgccagttcgtgcagtttacgccccgccagatgatggcgacgcaaaatatccgctacgctacaggcacactggaagtattgctgcatcaggcgcagctttttaccggcagtatggttgtcgtttggatagagaactttggtcagtttttccgcattgatgccctgctgttcggcacgcaagaaatcaccgtcgttaaatttagtcagatcaaacggatgcgcgtgcgtcgcctgccacagacgcagcggctgcgccacgccattacgatagccgacaacggggagatcccacgcttgaccggtaatggtaaactccggctcccagcgtccgtctttcgtcactttaccgccaatccctacctgcacatccagtgcttcgttgtggcggaaccacgggtagttactgcgatgccagtcatccggcgcttcaacctgtttgccatcgacaaaagactggcggaacaaaccatattgatagttcagaccgtaacccgtcgcagactgaccgacagttgccatactgtcgaggaagcacgccgccagacgtcccagaccaccgttacccagcgccgggtcgatctcttcttccagcaggtccgtcagattgatgtcataagccttcaagctatcctgtacatcctgataccagccgagattcaacaggttgttgcccgtcaggcgaccaatcaaaaactccatactgatgtagttaacatgtcgctgattcgccaccggcttggcgaatggctgagcacgcagcatttcggccagtgcttcactcactgctagccaccactggcgaggagtcatttcagccgcagaatttaagccataacgctgccactgacgactaagcgcttcctgaaattgcttatcgttaaaaataggttgactcataggagttccacttttcttagattttcaacacaacgttatcgctagtttgccaggctcgatgttgaccttcctcatcctgcgggggattaggcagggaggagttgcggggatgagcaaggaaatgtgatctcaaccacttaaagctagtgcaaaccacaggattagcatcaaatcaatgcaatacagcgcagaaaatctgtatctaagtgcaaaaaatggccgttgcgtattttcaaaaagcggaaggtaactctataaattaagtaaaggagtgaaacagtttcataagtaaaatatccagtgtgctccatctcattcttaatagatttattaagatcatctttttagatggcactttcatcaggaatgaagaagaaacccttgcttaaatgaatctgatgaacataagggaaaccagtattcacgctggatcagcgtcgttttaggtgagttgttaataaagatttggaattgtgacacagtgcaaattcagacacataaaaaaacgtcatcgcttgcattagaaaggtttctggccgaccttataaccattaattacgaagcgcaaaaaaaataatatttcctcattttccacagtgaagtgattaactatgctgattccgagtaaactaagtcgtccggttcgactcgaccataccgtggttcgtgagcgcctgctggctaaactttccggcgcgaacaacttccggctggcgctgatcacgagtcctgcgggctacggaaagaccaccctcatttcccagtgggcggcaggcaaaaacgatatcggctggtacagcctggatgaaggtgataaccagcaagagcgtttcgccagctatctcattgccgccgtgcagcaggcaaccaacggtcactgtgcgatatgtgagacgatggcgcaaaaacggcaatatgccagcctgacgagtctcttcgcccagcttttcattgagctggcggaatggcatagcccactttatctggtcatcgatgactatcatctgatcactaatccagtgatccacgagagtatgcgcttctttattcgccatcaaccagaaaatctcaccctggtggtgttgagtcgcaaccttccgcaactgggcattgccaatctgcgtgttcgtgatcaactgctggaaattggcagtcagcaactggcatttacccatcaggaagcgaagcagttttttgattgccgtctgagtagcccgattgaagccgcagaaagcagtcggatttgcgatgacgtttccggttgggcgacggcactacagctaatcgccctctccgcccggcagaatacccacagtgcccataagagcgcacgccgcctggcgggaatcaatgccagccatcttagcgattatctggtcgatgaggttttggataacgtcgatctcgcaacgcgccattttctgttgaaaagcgccattttgcgcagtatgaacgatgccctcatcacccgtgtgaccggcgaagaaaacgggcaaatgcgcctcgaagagattgagcgtcaggggctgtttttacagcggatggatgataccggcgagtggttctgctatcacccgctgtttggtaacttcctgcgccagcgctgccagtgggaactggcggcggagctgccggaaatccaccgtgccgccgcagaaagctggatggcccagggatttcccagcgaagcaattcatcatgcgctggcggcaggcgatgcgctgatgctgcgcgatattctgcttaatcacgcctggagtctgttcaaccatagcgaactgagcctgctggaagagagccttaaggccctgccgtgggacagcttgctggaaaatccgcagttggtgttattgcaggcgtggctgatgcaaagccaacatcgctacggcgaagttaacaccctgctagcccgtgctgaacatgaaatcaaggacatcagagaagacaccatgcacgcagaatttaacgctctgcgcgcccaggtggcgattaacgatggtaatccggatgaagcggaacggctggcaaaactggcactggaagagctgccgccgggctggttctatagccgcattgtggcaaccagcgtgctgggtgaagtgctgcactgcaaaggcgaattgacccgcagtctggcgctaatgcagcaaaccgaacagatggcacgccagcacgatgtctggcactacgctttgtggagtttaatccagcaaagtgaaattctgtttgcccaagggttcctgcaaaccgcgtgggaaacgcaggaaaaagcattccagctgatcaacgagcagcatctggaacagctgccaatgcatgagtttctggtgcgcattcgtgcgcagctgttatgggcctgggcgcggctggatgaagccgaagcgagcgcgcgtagcgggattgaagtcttgagctcttatcagccacagcaacagcttcagtgcctggcaatgttgattcaatgcagcctggcccgtggtgatttagataacgcccgtagccagctgaaccgtctggaaaacctgctggggaatggcaaatatcacagcgactggatctctaacgccaacaaagtccgggtgatttactggcaaatgaccggcgataaagccgccgctgccaactggttgcgtcatacggctaaaccagagtttgcgaacaaccacttcctgcaaggtcaatggcgcaacattgcccgtgcacaaatcttgctgggcgagtttgaaccggcagaaattgttctcgaagaactcaatgaaaatgcccggagtctgcggttgatgagcgatctcaaccgtaacctgttgctgcttaatcaactgtactggcaggccggacgtaaaagtgacgcccagcgcgtgttgctggacgcattaaaactggcgaatcgcaccggatttatcagccattttgtcatcgaaggcgaagcgatggcgcaacaactgcgtcagctgattcagcttaatacgctgccggaactggaacagcatcgcgcgcagcgtattctgcgagaaatcaatcaacatcatcggcataaattcgcccatttcgatgagaatttcgttgaacgtctgctaaatcatcctgaagtacctgaactgatccgcaccagcccgctgacgcaacgtgaatggcaggtactggggctgatctactctggttacagcaatgagcaaattgccggagaactggaagtcgcggcaaccaccatcaaaacgcatatccgcaatctgtatcagaaactcggcgtggcccatcgccaggatgcggtacaacacgcccagcaattgctgaagatgatggggtacggcgtgtaagtttagccggataacgcgccagatccggcttacatctctgcatcattcaatgctcacccgcgttacgccatctgtttctatcaaactaaaccgcaccggcaagaaacgctccaccaccgcgatattggtcagcagatggcaactgggatgggcgaccgtaaattcccccgcgcccgccagcgccatcggtagcaccagttggtcagcaagatattcccccaccgccgccgtgcttgccaggtagcgtttcacctctttcaccaactgtgccgcaaccacctcggcactgacgcgcttttcaccgacgacaaaaaagcgttcggtgatattttcactttcgacttcaaggctgacggtattacccggcccctggtcgcgcggcaggttatgaatattctgttcatgcagggaaaaactccccgccagtgtagcgatttcacgctcagcaacatggcgcggcacaccagctaatagaacttctccacgcatctgcacaatgttcccgcgctcgccaagttgcaaggtgttaaagcttgccacggggctgacttccgttgccaccacaccgcctccggcagggtaaaaaccgtggcgtaacagcgtggtttgctgatgaattcctattttcgccagcagcggctccagcacccggcggataaaatccgcaggcggcgcgctcgggttatcggtgccgccgctcacttcaacacggctaggtccatcggcaaaccacagcgcgggcagcaccgtttgcagcaccagcgtacaacttccggcgctaccgatagcaaagcggtaatcgccgccgcgcacggtgccgggccggaagagcagacgctggctccccagctccgcgccttccacggttgctccgcaaatttccgtcgccgcctttaccgcggtcagatgctggcgcaacagccccggtttcgcccgcccggcacgaatgctggtgatggtaaatggctggccggttatcatgctcaggctcagcgcgctgcgcaggatctgcccgccaccttcgccctgtgcgccatccagcgcaatcatccttttcatcatttatccttttacgcacaccacctgacgcagggtatagataacttccaccagatcgctttgtgccgccatcaccgcatcaatatctttatacgccatcgggatttcgtcgatcacttcggcatctttacggcattccacatgcgcggtggcacgaatttgatcttccacgctgaacagttttttcgctttagttcggctcattacccgcccggcaccgtggctgcagctacagaagctctcttcatttcccagcccacggacgataaagctttttgctcccatgctaccgggaataattccatattgaccagcacgcgcagacaccgcgcctttacgcgtcacgtagatctcttcaccaaagtgctgttctttttgcacatagttgtggtgacagttgatctcttccatcgccagcgtttgtggctgtctgaccgttttctgcgtaatgctctgcaatgccgttaccacgttttccatcatcgcatcgcggttaaggctggcaaaaagctgcgcccaggccacggctttcaggtaatcatcaaagtattccgtaccttccataaagtacgccagatcacggctcggcaacgtctcaagcgtttcctgcatctctttttgtgccagatcgataaagtaagtcccgatggcgttaccaattccgcgactaccggagtgcagcataatccacacctggtcgctctcatcaaggcagatttcaataaagtggttaccggttcccagcgttcccaggtgtttatagttattggtattcaggaaacggggatatttttgcgttaaccactgataaccggcttcaagctcagcccatttagcatcgacgttaacaggtggattttcccaggcacctttatcacgtttacaacggccagtggtacgcccgtgcggcacggccgtttcaatcgcctgacgcagctctgccaggttttcaggcaggtcttccgccgttaacgcggtacgcagcgcgttcattccacagccaatatccacgcccaccgccgccggaataatcgcccctttggtcgggatcacgctaccaatggtggaacctttacccaggtgtacatcaggcattaccgcaatatgtttgaaaataaacggcatcttcgccgtattaataagttgctgacgcgcatcggcctctaccggcacgcctttggtccacatttttaccggggcattttcagtggtcagtaattcgtaattcattttgtttttctcttttcgttgtttgctgtcctgataattgcaaccgtcgtgccagaaaattaaataagcagcttaattttttaattcattgttttaaaaaagattatatctttacgtccgtaaccggagatttcccgcaaagccaatttaccgataatgaaatatcgtcttttataaggatatctaagatgcgtaaaacagtggcttttggctttgtcggtaccgtactggattatgccgggcgcggcagtcagcgctggagtaaatggcgtccgacactctgtttatgccagcaagaaagcttggtcatcgatcgactggaattgttgcacgacgcccgcagccgcagcctatttgaaacgcttaaacgcgatatcgccagtgttagcccagaaacagaagtggtgagcgttgagattgaactgcataacccgtgggatttcgaagaggtctacgcctgcctgcatgatttcgcccgtggttacgagtttcagccagaaaaagaagactatttaattcacatcaccaccggtacccacgtcgcgcagatttgctggtttctgctggcagaagcgcgttacctgcccgcccggctgatacaatctagtcctccgcgcaaaaaagaacagccgcgcggcccaggtgaagtaacgattatcgatctcgatttaagccgttataacgccatcgccagccgctttgccgaggaacgccagcaaacgcttgattttcttaagtccggcattgccacgcgtaacccccacttcaaccgcatgattgagcagatcgaaaaagtggcgatcaaatcccgcgcgccgattctgcttaacggtccaaccggcgcgggcaagagttttctggcgcgacgcatcttagagttaaaacaggcgcggcatcagtttagcggcgcgtttgtggaagtgaactgcgccaccctgcgcggcgataccgccatgagcacgctgtttggtcatgtaaaaggcgcgtttaccggggcgcgggaatctcgtgaaggtttattacgcagcgccaacggcggaatgttgtttcttgatgagattggcgaactgggcgcagacgaacaggcaatgctgctgaaagccattgaagagaaaaccttttacccgtttggcagcgatcgccaggtgagcagtgattttcagcttatcgccggaacggtgcgcgatttgcgccagctggttgccgaaggcaaatttcgcgaagatctgtacgcgcggatcaatctctggaccttcaccctgccgggtctacgccagcgccaggaagatattgaaccgaacctggattatgaagtggagcgccacgccagtctcactggcgacagcgtgcgttttaacaccgaagcgcggcgcgcctggttggcttttgcgacctctccccaggcaacatggcgcggtaactttcgcgaactttctgccagcgtcacgcggatggccacctttgccactagcggacgcatcactctggacgtggttgaagatgagataaaccgtctgcgctataactggcaggagagccgcccctccgcgcttacggcgttgctgggcgcagaggcagaaaacatcgatctcttcgaccgtatgcaactggaacacgttatcgctatctgccgccaggcaaagagcctttccgcagccggacgccagctttttgacgttagccgccagggcaaagccagcgtcaatgacgcggatcggctacgcaaatacctggcgcgttttggtctgacgtgggaagccgtgcaggatcagcacagctccagttgaatatggtggtccgtcagcacctgcatcacgcttactggcggcggggcgtcggtgtagacggcatctaccatgctgatgctgcccatattgaccatcgcgttacggccaaatttcgagtgatcgacaaccagcataacgtggcgcgagttctcaataatggcgcgtttggtgcgaacttcgtggtaatcgaactccagcagcgagccgtcgctatcgatgccgcttatccccagaatgccgaaatcaaggcggaactgggagataaaatcgagcgtcgcttcgccaatgatcccgccatcgcggctgcgtaattcgccaccggcgagaatgatgcgaaaatcttcttttaccatcaacgtgttagcaacgttgagattgttggtgacaatgcgcaaattgctgtgattgagcagtgcgtgcgctaccgcttccggcgtggtgccgatatcgataaacagcgtcgagccattggggatttgctccgccactttgcgggcgatgcgctctttttcttcggtctgggtggccttgcgatcgtgccacggcgtgttaaccgaactggaaggcagcgccgcaccgccatgatggccaggatcaggttttgctccgccagctcattgaggtcgcggcgaatagtctgcgggctgacggagaaatgctctaccagctcttcggtactgacataaccctgctgtttaaccagttcgataataccgttgtgacgttgtgtttgtttcatttataaatccctggaattattttcgttttcgcgcattgaggctatcaacaaaagccatcgctaaacccacggctaacccggcgatgtgtgctccgttcgccatgctcatcccaaacaaatcaaaccatccggcgacaatccagatcagcgcaaagataattaacccacgttgcaggtaaatgccactttgcggatcgcgttcgccacgtagccagacgtagcccatcagcgcatacaccacgccagaaagcccgccaaaccacggcccgctgaatttttgctgcacatagccgcttaacagggcgctgataagcgtaatgacaattagcttaccgctaccgaggcgtttttccaccgcaccgccgagataccaccaccagagcaggttaaagaggatatgcatcaggctgaagtgcattaacgcgtgggtgaagtaacgccagaactcaaatttcagtgttggatcgaatggccaggccagccataacatcacttcctgatcgccgagaatttgcatggcaataaacaccaccacgcaggcgatcatcatcacccaggttaccggacctgcgcgttcacgcaaggcggcaaagaaaggataacggcgataatgcaggccactgccggtatggcctgcctgccagctcgccgccagataacgcggatctgccgggttttcgagaaaacgcgccagctccgcccgtacgcgctcggcctgggactcatccgccagccagacatcgctttggttatgttgttgaatcgtgaggataacaccctgcgtcgccatgtaatcaacaaacgcctgcgccacgcgggggttagcaaaagaggtaatcatcaacatcgttgctgtcgcttattccacacaaaaggggacagtataaagcgttacgcgccgtacgccacctctgcgggaaactgacgttgccaggcttcaaagccgccgtcaatgctatagaccacatcgtagccctgttgcagcagatactgcgccgcgcctttgctgctattgccgtgataacacatcaccatcaccggagtgtcaaagtcgttatcacgcataaaagcgcccagcgtgtcgttggttaaatggaaagcctgcaccgcatgtcccattgcgaaactctgtggatcgcgaatatcgaccagcaccgcctctttttcctgcaacttctggtgcgcgtcggcaacgttaatacattcgaactgatccatgcgtctctctttctttacaaacaagtgggcaaatttaccgcacagtttacgtcgaagcggcagataaacgccataatgttatacatatcactctaaaatgttttttcaatgttacctaaagcgcgattctttgctaatatgttcgataacgaacatttatgagctttaacgaaagtgaatgagggcagcatggaaaccaaagatctgattgtgatagggggcggcatcaatggtgctggtatcgcggcagacgccgctggacgcggtttatccgtgctgatgctggaggcgcaggatctcgcttgcgcgacctcttccgccagtagtaaactcattcacggtggcctgcgctaccttgagcactatgaattccgcctggtcagcgaggcgctggctgaacgtgaagtgctgctgaaaatggccccgcatatcgccttcccgatgcgttttcgcctgccacatcgtccgcatctgcgcccggcgtggatgattcgcattggtctgtttatgtacgatcatctgggtaaacgcaccagcttgccgggaagtactggtttgcgttttggcgcaaatagtgtgttaaaaccggaaattaagcgcggattcgaatattctgactgttgggtagacgacgcccgtctggtactcgccaacgcccagatggtggtgcgtaaaggcggcgaagtgcttactcggactcgcgccacctctgctcgccgcgaaaacggcctgtggattgtggaagcggaagatatcgataccggcaaaaaatatagctggcaagcgcgcggcttggttaacgccaccggcccgtgggtgaaacagttcttcgacgacgggatgcatctgcctagcccttatggcattcgcctgatcaaaggcagccatattgtggtgccgcgcgtgcatacccagaagcaagcctacattctgcaaaacgaagataaacgtattgtgttcgtgatcccgtggatggacgagttttccatcatcggcactaccgatgtcgagtacaaaggcgatccgaaagcggtgaagattgaagagagtgaaatcaattacctgctgaatgtgtataacacgcactttaaaaagcagttaagccgtgacgatatcgtctggacctactccggtgtgcgtccgctgtgtgatgatgagtccgacagcccgcaggctattacccgtgattacacccttgatattcatgatgaaaatggcaaagcaccgctgctgagcgtattcggcggtaagctgaccacctaccgaaaactggcggaacatgcgctggaaaaactaacgccgtattatcagggtattggcccggcatggacgaaagagagtgtgctaccgggtggcgccattgaaggcgaccgcgacgattatgccgctcgcctgcgccgccgctatccgttcctgactgaaagcctggcgcgtcattacgctcgcacttacggcagcaacagcgagctgctgctcggcaatgcgggaacggtaagcgatctcggggaagatttcggtcatgagttctacgaagcggagctgaaatacctggtggatcacgaatgggtccgccgcgccgacgacgccctgtggcgtcgcacaaaacaaggcatgtggctaaatgcggatcaacaatctcgtgtgagtcagtggctggtggagtatacgcagcagaggttaagcctggcgagctaaattaacgtaaggtgatcaggtcagatttcaatctggcctgagactgatgacaaacacaaaactgcctgatgcgctacgcttatcaggcctacgtggtttatgcaatatattgaatttgcatggtcttgtaggccagataagacgttcacgtcgcatccggcatgaacaaagcgcactttgtcaaaaatctaacctactttttaattcagggaattaccgcaaagcccacgccatcatacccaacgtaacaaaactcaggcacgttccccactcgcccgctgaaaaatagcattaatgcgcccagcgccagcataaaaattttgagcagaaggtaaattgttggcgtgataaggatattacaaacttcaataataccggcaagtccgacacccagcatggcaataaccaccgccaaaaattgcgccagtatggggatgccgaaaaaagtcattaccaggctggtcaaaatccattttctgttttgcattattctttccattctttttgaatggtgaaattatactccccgagtccccttgccccttctggacacttttccgaaatgatggcggaaaaaaacgggaccctttggccccgttctatttattggtgaacttacaatctcaccggatcgatatgccagatatgatcggcgtactctttgatagtacggtcagaagagaagtagcccatattggcaatgttcagcatcgcttttgcggtccactcttcctgaagctcgtagagttcatcgactttatcctgacaatcgacatagctgcgataatccgccagtacctggtagtgatcgccgaagttgatcaggctatcaaccagatcgcgatagcgacccggatcttccggactgaatacaccgctgccgatttgcgtcagcacctgatgcagctcctcatctttctcgtagtattcacgcggtttgtagccctgacgacgcagttcttccacttcttccgctgtgttaccaaaaataaagatattgtcagcaccgacatgatccagcatctcgacattcgcaccgtccaacgtaccgatagtcagcgcaccgttaagcgcaaacttcatgttactggtgccggaagcttccgtccctgccaggctaatctgttcagacagatctgccgccggaatgatcaactgcgccaggctaacgctgtagttcgggatgaacacgactttcagcttatcgccaatctgcggatcgttgttgatcactttcgctacgtcattgatcaaatgaataatgtgcttcgccatgtaataggcgctagccgccttaccgccaaaaatattcacgcgcggtacccacttcgcatccgggtcggccttgatgcggttatagcgggtaatcacatgcaacacattcatcaattgacgtttgtattcgtgaatacgtttgatttgtacatcgaacaacgcctttggattcaccaccacattcagctgctgggcgatatactctgccagacgctttttgttctccagcttcgcctgatgcacagcgtgattaaccattgggaaatcacagtgttgttgcagctcattaagcaggctaaggtcggtgcgccagttacggcccaggtgttcgtccagcacggcactaaggcttgggttcgctaccgccagccagcgacgcggcgtcacaccgttggtgacgttggtgaaacgacccgggaagattttcgcaaagtcggcaaacaagctttgcaccatcagattagagtgcagttcgcttacaccgttaactttgtggctcacaacaaccgccagccaggccatacgcacacgacgaccgttggattcatcaatgatgctcgcccgtcccagcagatcggtatcgttcggatactgttcctgcaaggttttcaggaaatagtcgttgatttcaaagatgatctgcaggtgacgcggcagaattttacccagcatatcaaccggccaggtttccagcgcctcgctcatcagcgtgtggttagtgtaggagaagacctgacaacacacctcaaacgcgtcgtcccagctaaattggtgctcatcgatcagcagacgcatcatctcaggaatgctcagtaccggatgggtatcattgagatgaatcgcgattttatccgccaggttatcgtaggttttatgcaactgataatggcggcttaaaatgtcctgaatggtgctggaaaccaggaagtattcctgacgcaggcgcagctcacgcccggagtaggtggagtcatccggatacagtacgcgagatacgttctcggagtggtttttatcttccactgccgcgaagtagtcaccctggttgaatttaccgaggttaatttcgctactggcttgcgcactccacaaacgcagcgtgttggtcgcgtcggtgtcgtaaccagggattatctgatcgtaagcgactcccagaatctcttcggtttcaatccagcgcgtttttttaccttcctgctgaatgcgaccgccaaaacggactttatagcgcgtgttgtggcgtttgaattcccacgggttaccgtattccagccagtagtctgggctctctttctggctaccgttaacgatgttctgcttgaacataccgtagtcatagcggatgccgtaaccgcgccccggcaaccctaacgtcgccagagaatcaaggaagcaagccgccagacgtcccaggccaccgttaccgaggcctgggtcattttcttcatcaatcagctcttcgagatttaaccccatcgcttccagtgcgccctgtacatcttcgtaaattcctaggctcaacatggcgttggagagcgtacggccaatcaaaaactccatgctcaggtagtaaacctgacgagtttcttggctcaactgggcacggttactacgtaaccagcgctccacgagacgatcgcgcacagcaaataacgttgcgttcagccattcatgtttattggcgacgaccgggtcctttccaatcgtaaacatcagcttgtaagcgatagagtgcttaagagcttctacgctaagcgtggggctactatatgtaaacggagcattcatataggcgtttcctgaaaattatttcaagcgatagtaaagctcacggtagctcttcgccgcgacctgccagctaaaatccattgccatagcctgacgttgcacaaaccgccacagactaggacgggaccacagtacaaaagcacgtcgaatagcccgtaacaggctccaggcattactatcttcaaagacaaacccactggcgacgccatctgcaaggttctcaagagaacagtcagaaaccgtatcagcaagcccaccggtgcgccgcactaacggcagcgtaccgtacttcaatccataaagttgcgttaagccgcacggttcaaaacggctgggcaccagaatgacgtccgcgccgcccataatgcgatggctaaatgcttcgtgatagccaatctgaacgcccacctgaccggggtattccgctgccgccgcaaggaaaccttcctgcagcaccggatcgcccgcgccgagtagcgccagctgcccgccctgctccagaagacccggtaaggcttccagcaccaggtcgagacctttctggctggtcagacggctcaccactgcaaaaagcggcactttatcgtcaaccttaagccccattgcgatttgtaactggcgcttattttccgctttatcttccaacgtatcgcgggtgtaacggctggccaacagtaagtccgtctctggactccagattttctcgtccacgccgttcagtacgccggaaagacgcccttcacggtgacgctgttgcaacagaccttccataccgtaggcaaactgcggttcggtgatctcgcgagcgtaggttggactgaccgccgtaatgtgatcggcatagtacagaccggccttcaggaaagagatttgtccgttgaattccagcccatgaatattaaagaaactccatggcaattggatgtcattcatgtgatgtgcataaaacatgccttgataggccaggttgtgcacagtaaacacgctcttcgccggacgcccgcgcgccgccagatacgcaggcgcaaggcctgcatgccagtcgtgcgcatgcaccacatcaggacgccagaatgggtcaagcccgctggccatttctgccccaacccaccccagcagcgcaaaacgcaatacgttgtcggtataggcaaataagttggtatcgtgatacgggcttcccggacgatcatagagatgcggcgcgtcaatcaggtaaatgccaaccccgttgtaatgaccgaacaacagcgtgatatgtccggcgaaggtatcacgacgggatactacctgcgcatcggtcacgccacggcgaatatcgggaaatgcaggcaacagtacgcgagcgtcaacgccgtctgcgatttgtgctgcgggtaatgccccaataacatcagccagaccgccggttttaagcagcgggaacatctcactacatacatgtaaaacctgcattatcgctcctgtttatgccctaacttccgtagcatttcgcgcgttaccagcacgatgccttcttcactacgatagaaacgacgtgcatcttcctctgcgttttcaccaatcaccatgccttccggaataacacaagcacgatcgatgacgcagcggcgcagacggcagctgcgacctacccatacttccggtaacaatacggcggaatcaatgttgcagaaactattcacgcgaacgcggctgaacagaacggactgcaccaccacgctaccggagatcacacaaccgccggaaaccagactgttaagggtcatcccgtggctaccggagcgatcctgcacgaatttcgctggcggtaaactttcattgtaggtgcgaattggccaattgcgatcgtacatatccagttccggcaccacagaggccagatcgaggttcgctttccagtaagcttccagcgtacccacatcgcgccagtacggctcggcatccgggtcggattgtacgcaagagagcgggaacgggtgcgcataggccagaccggcttcggtgatcttgggaatcaaatctttgccaaagtcgtggctggagttctcatcgcgatcgtcttcttccagcagttcatacagatagtcggcgtcaaagacgtagatacccatactcgccagagatttgctcggatcgttcggcatactcggcgggttagcaggtttttcaacgaattcgataattttatcgttctcatcaaccgccataacgccaaatgcggaggcttcttcaatcggtactggcatacaagcaacggtgcaacgtgcgcctttttcgacgtgatcgataagcatacggctgtagtcttgcttgtagatatggtcgcccgccaggatcaccacgtattccgctttataacggcggataatgtcgaggttttgggtgaccgcatctgcggtgccgcgataccagttttcccctttcattctctgctgtgctggcagcagatcgacaaactcgttcatttcttcattgaagaaactccagccgcgctgaatgtgctgcaccagagtgtgggactggtactgggtgatcacgcccatacgacggatcccggagttgatgcagttagacagcgcaaagtcgataatgcggaacttaccgccgaagtgtacggccggttttgctcgcttattggttaaatccttcaggcgggtaccacgtcctcccgccagtatcagggcaacagatttcaatggcagctggcgcgccaacattaagtgatcgttcttctctaaactaaccatgactaactccttttttatcatctctggaacacacacaatccgtgtgcaggtccctgccagacagccgtaatcactgggttatcctctccagcgaatgggggaatggcgtgccactccccagcaggtaaaacaatctctgttacctcaagcgtggcgttaattgcgatcaaaaagcgatcgctgagcagaatttgcagctgtttcggcccgttttgccactcatccgtgcttaaaggttgagcatatcgatttagccaacggacattgccgtcgccttcttcccaccagcgattctccaccaaagcgggaatgcgcttgcgcagatggattaacgcggcggtaaatgcggttaaaccactgcttgcctggctccagtccaaccaggttaattggttatcctgacagtaggcattgttattgccatgctggctgtgaccatgttcgtcaccggccagtaacatcggcgtaccctgggagagcaacaacgttgttaacagggcgtgaatgctgtcgcgccgccgttcaaccaggtcaagagaaccgcctaacccttctttaccatgattgttactgtaattgttgttggtcccgtcgcgattttcttctccgtttgcttcattgtgtttatggttgaagcaaacgcagtcgcgaagcgtaaaaccgtcatgcgcggtgacgagattaatcgcggcactcggcagacgaccattacgtttaaaaacatcgctggaggcagcaaaacgcccggcaaacgcccccagaggcaaatcataatgtagccagaaacgacgggcagcatcgcggaaatgatcgttccactcggcaaacagcggcgggaaatttcccacctgataaccaccaggagcgatatcccacggttcagcaattaacttcacctggctgagcaccgggcagttctggatagcggtaaacaacggcgcatcctgacggaactctggcgtacggcccatgactgccgccagatcaaagcggaaaccatcgacgtggcaggtttctacccaataacgcaggcaggcgctggcataatccaccaccgccggatgactcaaattgagcgtgttgccgcaaccggtccagttgtgataatcgccgtcttctcttatccaataatagctacggttatcgatcccacgcaggctgaataacgggccgtcgaggtccagttccgcactatggttgagcacgatatcaagaatgacttcgatacccgctttatgcagtgctttgattgcatcgcgaaactcatccagcgccgtttctgggctgcaggcatacgccggatgcagcgcaaacatcgccaccgggttgtaaccccagtagttacttagccccatgcgttgcagacgtggttcactggcaaactgcgccactggcagcagttccagcgcggtaatgcccaattgtttcaaatagttgatcatcaccggatgcccgagggctttataagtgccacggatctcgaccgggatctccgggtgcaagtacgttaatcctttgacatgggcttcataaatgatggtgctgccccacggcgtgcgcggcggggcatcatcttcccagtcatagtgatcaaccaccactacgcatttcggcgcaatggcggcgttgtcgcgatagtcaggttcattatgaccggcgtgcagcagcgggttatctttaaactccccgtcaatttgccgcgcgcaaggatcaatcaacaacttcgccgggttaaagcgatgcccctcggcgggttgccaggggccatgaacgcgataaccataacgcaaacccgggcgcgcatccggcagataaccgtgccaaatgtcgccactgtgccctggcaagtcatagcgatgttcctggccattggcgtcaaagacacacagttctacccgctcggcatgagcggagaaaagtgtgaagttgacgccctgaccgtcgtaatgcgcgccgaggggagcgggtttgccaatggcgagttgtgtcattctgcctcccgaaccagccagatagtggccagcggtggtagcgtcaggcttagactatgctgacgaccgtggctggcaatctcatcgctgtgtaccgtgccgccattgcctgcattactgccgtgatagtgcatggaatcggtattgaggatttcacgccatttgcccggctggtttatgccgaagcgataatcatgacgcggtaccggcgtaaagttactggcaacgatgatttcgttaccctctttatcgcgacgcacaaagatcagcacgctgcgttctttgtcatccaccaccagccattcaaagccgtacgggtcaaaatccagttcatgcattgctttatggtggcggtaggtgaggttcagatcgcgcaccagacgctggacaccgtggtgccagttatcgccgccttccaacagatgccagtcgaggctggcgtcatggttccactcgcggccctgggcaaattcgttacccatgaacagtagtttcttgcccgggaatgcccacatccagccatagtaggcgcgcaggttcgcgaatttctgccatgcgtcgcccggcatgcggtcgagaatgctttttttaccgtggaccacttcatcatggctcaacggcaggacgaagttttcagtgtagttgtagagaatcccgaaggtcagtttatcgtgatgatactgacgataaaccgggtcgagcttcatgtagtccagggtgtcatgcatccagccgaggttccacttgtaccagaagcccagaccgcccatatcctgcggacgagaaacgccagggaaatcggtagactcctcagccattgtcaccgcaccggaaacctgctcaccaagaatacggttggtattacgcaagaattcaatcgcttcaagattctcgcgcccgccaaattcgttcgggatccactccccctctttacggctgtagtcgcgataaatcatactcgccaccgcatcgacgcgcagcgcatcaataccaaaacgttcaatccagtaaagcgcgttaccgacgaggaagttactgacttcacggcgaccatagttgtagatcagcgtgttccagtcctgatgatagccttcacgcggatcgctgtgttcatacaagttcgtgccatcaaattcggcaagcgcaaagtcatcagtcgggaagtggcctggcacccagtcgagaatcacgttcagaccagctgcgtgtgcggcatcaatgaaataacggaagtcgtcgcgagtaccaaaacggcgggttggcgcatacaggccggttggctgataaccccaactgccatcgaagggatgctcgttaatgggcagtagttcgaggtgggtaaagcccatccatttagcataaggcaccagttgatcggccagctcgcggtagctcaaccagaaattgttgtcggtgtggcgacgccaggaacccaggtgaacttcataaatagagattggcgcatcaaactgattcgcttttttgcgctcttcagtctgtacaaccttttccggcagcccgcaaataagagacgcggtttccgggcgcatttgcgcttcaaaggcataagggtcggacttcagacgcaagttgccattggcatcaatcatctcgtatttatagagctgaccgttatgcgccccagggataaacagttcccagatgccgctctctttacgcaggcgcatcgggtgacggcgaccgtcccagtagttgaattgcccaaccacgctgacccgacgggcgtttggagcccagacagagaaacgcgtacctgtgacgccatccatagtatctgcatgcgcgcctaaggtttcatacgggcgcaggtgagtaccttcagataatagccaggcatccatttcctggattagcggaccaaaacggtaaggatcatcaatcaggttttgctgaccatgccagacaacagccaactgatagcggaaaaaattcttacgtcgcggaatgacgccgctaaagaatccccgactgtcgagacactccagttttgcgagtttgcgcccggttttcggttcaatcacccacacatcggtagcgtcgggtaaaagggcacggacttccagtcccgcggtggttttatgcattcccagtacggaaaaaggatccgcaaaatggcctgcaattagcgcgttaatcacgtctctatcgatacgatcggacatgcttgtcttcctgttttattgtgtcaccccatccaattggatttttgacttctggttgtgacatttttttgacctgaacggcgcagcactctgtgcatcctctctgcgtcgtcctcacttcaggtaaggctgtgaatactcatgtattcagccacccttaaagaatagccaatgctctatttaactcccggtaaatcatgaaacatctgcgcttactcctgtattacgcactaacaggggcggcatcgcgccccagatttaatgaataaagattacgccagttgacgaagcatccgacgcagcggctccgcggccccccacagcagctggtcgcccacggtaaaggcactcaggaactctggtcccatattcagcttacgcaggcggcctaccggcgtggtcagcgtgccggtaacggcagctggggttagctcacgcatagtgatttcccgatcgttcggaacgactttcgcccacggattgtgcgcagccagcagttcttccacggtcggaatagacacatcttttttcaatttaatagtgaatgcctggctgtggcagcgcaatgccccgacacgcacacataaaccatctaccggaattacggaagatgtgttgaggatcttgttggtttccgcctgccctttccactcttcgcggctctgaccgttatcgagctgtttgtcgatccacggaatcaggctacccgccagcggcacgccaaagttatccaccggcagctcaccgctacgggttaaggttgtgactttgcgttcgatatcgagaatagcagaggacggggtcgcgagttcatctgccacatggccatacagatggcccatctgggttaataactcacgcatatgtcgcgcaccaccgccggaagcggcctggtaggttgcaacggacacccaatcaacaagatcattggcgaataaaccacccaagctcatcaacatcaggcttacggtacagttaccgccaacaaaagtcctgatgccattatttaatccgtcggtaatgacgtcctgattgacggggtcaagaatgatgatggcgtcatctttcatgcgcagagagcttgctgcgtcaatccagtaaccttgccatccgctttcacgaagctttggatagatttcgttggtataatcgccgccctgacaggtcacaatgatatcgagggcctttagcgcctccagatcaaaggcatcctgaagtgtgccagtggttccgccaaaagacggcgcagcctggccaagctgagaagtagaaaagaagacagggcgaatggcgtcgaagtcgcgctcttcaaccatgcgttgcatgagaacggagccgaccataccgcgccagccgataaaaccaacatttttcataagcgtttttttcctgcaaagatgtgtgctgtataaatgtgccggtctcctcttggcacatctttcaccatacaaaaagcagccaaagtcgcaagtgaaattaatcaatgatagcgaagccatcagtaatgcgacttatcctgctttgttagcacgcagaaagtccgcggcaattatcagggaatttgagttatgaatgaaatcatttctgcagcagttttattgatcctgattatggatccgctcggaaacctacctattttcatgtccgtactgaaacatactgaaccgaaaagacggcgggcaatcatggtgcgagagttgcttattgctctcctggtgatgctggtgttcctgtttgcgggtgagaaaattctggcatttcttagcctacgagcagaaaccgtctccatttctggcggcatcattctgtttctgatcgccattaaaatgattttccccagcgctagtggaaatagcagcgggcttccggcaggtgaagagccatttatcgtgccgttggcaattccgttagtcgccgggccgactattctcgccacgctgatgttgttgtctcatcagtacccgaatcagatggggcatctggtgattgctctgctgctggcctggggcggcacctttgtcatcctgctacagtctagcctatttttacgtctgctgggcgagaaaggggtgaacgcacttgaacgcctgatgggattgattctggtgatgatggcaacccagatgttcctcgacggcattcgaatgtggatgaaggggtaacgaggagagtttttcgaaaagaacccggtagcgtcacaactaccgggcgaacaaacttaactcaacagctggaacgcaatcatcccaacgatggcaccgacagtgccgaggatggtttccatcatggtccaggttttcagcgtttcggcttcggtcgcgccggtaaatttaccgaacaaccagaaaccggcgtcgttaacgtggctgacaacaatgctaccaccagcgatacaaatgctcagcgccgccatttgcgcaccggagtagttcagttgttcaataaccggcatcaccagtcctaccgccgttaaacaggctacggtggcagaaccctgaatgatgcgcactgcagctgccagcacgaagcaggtgatagcaatcggcaggcccatgccggttaacgcttcgcccagtgccggacctacgccagagtcaaccagcacctgtttgaacacgccgcccgcaccaatcaccagcagaatgatccccgccggttgcagcgcgtgaccgcaaatctccatcactttgtcttttggcatgccctgacgcattgccagaccgtaaatcgccaccagacaagcaaccagaatcgcggtaaacggatgaccgataaactcaaaccattcgtaagcagtacttccttccggcacaaaacgcgcggcaatggttttcagccctaccagcaccagcggcagcaggatcaggctcaggctgaatccgaaagatggcattttgccttcgccgagatgcggttcgctgatgtcgtcaggaatatgcagctcaacgtaacggctgatgaagttaccccacagcggcccggcaataatcattcccggaattgccgcacacaggccaatcaggatcatccagccaaagtcggcattcatctggcttgccagcagcatcggcgctggtccaggcaccagaaatgccgccgctgccgccacgcctgcaaataatgggattaccagcttcaccaggttcgtaccggtgtggcgcgccatactgaaagcaacgctaatcagcagaactatcgccacttcaaagaacagcggtagcgcacagaccagccccgcaaggccgatggcataatgcgcgcggctgtgaccgaaggatttgagcattttgacggcaatctgatcgactgcgccggtttcatgtaagatcttgccaaacatagctcccagggcgacaaccaccgccaggaagccgagggtgcctcccatccctttttccatcgtcgctgcgattttatcgagcggcataccagaaaaaaggccagcccccatggacaccaccattaaagccaggaaagcgtgcatacgcgccttcatgactaaaaacagcagcagtaaaacagaccctactgctgttaaaacaagcgttaatgtagtcactacttatttgccttttttaataacctcaatggtgcttgccacaacaccttccagcggttgatcgatatccaccaccagtacatcggtttcgtccgcacccggctcctgcagcgtttcaaactgcgtcaccaacatttgggttttaaagaaatggcctttgcgcgctttcaggcggatttcaatcacatcaaaatcgcctttcaaatagatgaaagagagattcggattaccttcacgcagcaagtcgcgatagtgttttttcaatgcagaacagacgatcaggctcactttattagtgcgctgcatagcaaacgcggcgtcgttcagcgcctgcaaccacggtttgcgatcgtcgtcattcagtggttcgccagacgccattttttcgatattgcgccgtggatggaggaaatcgccatcaagaaacgcggcatgaagttgatgcgccacttcactggcgaccgcagatttgccgctgccgcttacgcccatcaagacgtaaatgtggtgatcatggttagtcgtgctcaaagtggtgcccccacaatacaagaattaaaaatgttacgggtaactgttatcggtaacattgtccagccggacaatatcagaagcaatatccatccatgccttaagtgtataagtgtgagctacttcaaatttgtgggcttaaatagatccgcccggactcaaggtgaaacctaaatctaacattttcggtgtcacagattcgccacgaatacgcgccagcaggcgttcagcgccaatactgcccatccgctcacgcggcgtcagcacgctcgcaagtcgtggctccatcacctgaccaatgtcatgaccgtggaaaccggcaatcgccatatcgtcaggaacttttaaccccagacgctgacattcaaacgccgcgccgaccgccaggtcatcattcgtacagaacacgccatccagctgcggatattcccgccgcgcctggcgaatcagttcaataccggaagagtaagaagaagattgctcaaccatcacgctatatggcaccaggcctgcatccagcatcgcctgttcgtatcccttctgtttgatgatagtacgttcgtcgagacgtgcgccgagataggcaatgtggcgatgcccgcgagcaataatggcagtggtcatctggcgtgctgcttcaaagttatcaaaaccgacggcgatatcaaggcatgggctcttgctgtccatcagttccaccacgggaatacccgccacttcaatcatctttaaggtgcgcggcgtgtgggtacgttcggtgaggatcaggccgtcgatattccaggagagcatggattcgaggcgttcttgctccatttccggtttataaccgtagtgcgccagcatggtctgataaccgtgcgcgtcggtgacgctttcgattccgcgtaatacttccgcgaaaacctggttggtgagagaaggtaacaggacgccaatcgcccggctggtggcgttagagaggatatcgggcgcacgattgggaatatagcccagttcatcaagagccgcggcaatcttgccgcgtagagcgacggaaacctgctccgggttgcgtaaaaaacggctgaccgtcattttggtcacgcctacacggtcagccacatcctgaagtacgggtcttttctttttcatcgtcctgaaggtacaaaagagatagattctcttagtttaacacggacacatcagaaccttcccggggaaaacagtgcttgtttacaattattagatatacactaaatcaattgcatcgcattgtgctaacgacgcggcaaaaccccggaagcgtacatcagcacgcgaccggagcgagcgaggaagcctgcaaaaaggcaggcttcaaagatgccgttgagttttaaaccggcggcagatcgaacagtaacacttcgctgtcgctatccgcatggatggagattgcctgctcatcccagattgccagaccatcgctggtgctggctttcacgccgttaatggtgacattgcctttcaccacctggatccagacgcggcgttcagcggcaatctgatgcacgctctgctcatctttcagcaacgcccagcggtacagttccatatcctgatgcactttcaaactaccatctcgcgcatccgggctgagcaccagctgtttgccctgtacggcatcgaagcgacgctgttcataacgcggcgtaataccgttttcttcaggcatgatccagatctgatacagatgcagacgctcggtgctgcttgggttgtactcactgtgacgaatacccgtaccagcactcataatctggaactcacccgccggaacctgctctttattgcccatgctgtcctgatgctcaacagtaccttccagcacgtaggtcaaaatttccatatctttatgcgggtgagtgccgaagccctgccctgcttcaatcacgtcgtcgttaatcacgcgcagcgcggagaagcccataaagttcggatcgtaatagttggcaaaagagaaagtatgccaggagtccagccagccatgatttgcatgaccacgttcatttgctttgcgtaagtagatcatttgtattcgccccctgaatgatttcgatgggcttagtgtggacccgatctgcctgggatgatagagggtgaaaattgacccctctgttcaaaaaaattgaactattcgaggggccatcaaacttacttagcgagagttactgtggagggagaggcttgctcaaatccgcgttcaaggatttccagattggtaagaacttcagattccttgacgtaatttggcgcaccgtgggtgatggtttgatacaacgcatcataaacgcgcccgtaatcgcccatctccggcttcatctcttctctgaccgtcacgccctcgtcattgacatactccagcacaccgacgctatcatccgctgcgaatcccggttcgcccggcataatattagccttcaggctggtttcctgctggtcgataccgtatttaataaagctacctttcttaccgtgaacgataaatttcggataatcgattttcaccagatggctggttttgacgatggctttcaggtcgccataaaacagttgcgcttcaaaggtgtcgtcaggattggctttattacgcaggctgcggatgtcataagcgacgtgatccgggcgaccgaacagagaaataatctggtccatcgtatgcacaccaaggccataaaacgcgccatcctgcggcagcccaggtttggtttctgccaccgggcggtaatagtcaaaatggctttccacttcaacaatctctcccaacttgccactttcaatcgcttttttcgctgtcaggaagcaggagtcaaagcgacgattctgatacggcgtgacggtcagccctttgcttttcgccaacgcaaacagctctttcgcctgcgcaagtgtcggagtgaacggtttttcgaccagcacatttttcccggcttccagcgcgcgtttcgcgtactcgaaatggctgtccgcgtgggtgcagacaacaaccagcttaacatcgggatcgtttagtacttcgtcgagatcgctggtgaaatggatatgggaataaatgggagcctgttcttccggcttcgcatggcgacgaaaaatatgcgcgacatgccagctatccttgcggttaagtacatacggcagatggtaacgggtggtgcttttgccgaagccaataaaggcgcagttgatgaccatgatttcgtcctttttaaggtggttatttacaccttagcgcaaagcggacgtggttcctactggagtgcgcataacgaacacaagcactcccgtggataaattgagaacgaaagatcaaaaaaaaagccagcacccggctggctaagtaatactggaagcaatgtgagcaatgtcgtgctttcaggttctccgcgagggtcttcctgatcgcgagacaataataatcattctcattcgcacttgtccaacactttttgcaaaaaaatgcatttgactcgcatttgaaagtcaatgatgttgaaagggacatttaccccaaagaggacaaaggaacaaatgctcttcccacgaagagggccgctaaccttagtaccccgccgttaaatcatccacgctgcgcgggtcggatgcgccgtacaactcaccgtccggcccaaccataatgctttgtgtactgcccatcgcctctttcagcgccactttctgaccttttgcttccagcagcttgagcgtatccgggctaaaccctttttcgacacgcagctcgtccggcaaccactgatggtggaaacgcggcgcattggtcgcttcggcgacgttcaagccataatcgatgctattcaccaccatttgcagcactgtagtgatgatccggctaccgcctgggctaccggtaaccagccaggttttaccgtctttcaccacaatggtcgggctcatgctgctcagcgggcgtttgttcggcccgacggcgttggcatcaccgcccaccagcccgtaaacgttcggtacgcccggtttggcggagaaatcatccatctggttattaagcagaataccgctctcgcccgcgacaatgcccgtaccgaaggtggtgttcagcgtataggtcaccgccaccgcgttaccatctttatccaccacactgtaatgggtagtttgattactctcataaggcgcaagcttgccggggcgaatttcgctggatggcttcgctttattgatatcaatttgatcggcaatagatttggcataggctttattggtcagcgcctgccacggtactttgacaaaatccgggtcgccaagatattcgctgcggtcggcgtaggcgtatttctccgcttctgccatgatttgcatcgcatcggcgctgccaaagccgtatttcttcatatcgaagttttccagaatattgaggatttgtacgatatggatcccgccggaggatggcggtggcatggagtaaacctgatacccgcgataatcgccgcttatcggagtgcgttcgaccgctttataggctgctaaatcttctttagtgatcaagccaccgtttttctgcatctcctgggcgatctgttccgcaatcgtgcctttatagaattcgtccgggccgttttcagcaatcatctccaggctctttgccaggttcgcctgcaccagcgtgtcgccctttttcagcggctcgccctctttccagaagatagctttactgttttcgtgattcggcaacacttcgctaccgtaggttttgagatcgtcagccagcgcgtcgttaacgataaaaccatcgcgtgccagtttaaacgcgggctgcacgactttgttcagcggcatggtgccgtatttatccagcgccaggctgaaacctgctaccgtacccggtgtgccggaagccagatggctagtgagactttttttgctgtccgggttgccctgatcatcgaggaacatatcgcgggtcgctttggcgggtgccatttcgcggaaatcgatagccgtggtattgccatttttgctgcggattaacataaaaccaccaccgcccagattccctgcctgcggatgcgttaccgccagcgcgtagcccaccgccacggcggcatcaacggcattcccgccctccttgagaatatccacccccacctgagtggcagtggcgtccacagacgctaccattccctgtttcgcgcgtaccgggtggaagacatcttcctccacaccatagctgacgggcggcgcaggaggcgcggcggcggcgctaaaacaacttccactgagcagagcagcaatggccacccggcgtaaaaacgtcggttttatcatcgttattctccagagattaaggggcaaccccagctaagcctggtatataactctgaattaatcatcgttttgtcgggaagcgagtaaacttaaaggatatcttcagaggaggatacgcgatgaaacgacttctgattcttacggcactcctgccgtttgtcggctttgcacagcccattaatactctgaacaaccctaaccagccggggtatcagatacccagccagcagcggatgcaaacccagatgcagactcagcaaatccagcaaaaagggatgctgaatcagcaactgaaaacgcaaactcagttgcaacagcagcatttagaaaaccagataaacaataattctcagcgggtgttgcagagtcagccgggggagcgaaatcccgcccggcagcaaatgctgcccaacaccaacggcgggatgttaaacagcaaccgtaatccggatagtagcttgaatcagcagcatatgctgccggagaggagaaacggcgacatgctgaatcagcccagcacgccgcagcctgacattccgttgaaaactattgggccgtaattattgggccgtaaagttcggaccaatcacgtcaatcgcatcggtacagatgcaatccacaccccagcgcagcaactctgctgcgcgctggggtttattgacggtataaaccagaatccgcagtccggcgtctttcaactgcatcactcgcgctttattgagtaacttatgattgagatgaatagagacgcagcccagccgcgcggtcagttcgcgccagtcgtcgcgccactcatccagcaacaaaccgcgcggcagttccggtgccgcctgttgtgcagcttctaaagcatcaatctcaaagctactcagcagcggcggcgtcataccggcccacagctcgcgtgccgccagcgccaccattttgcccgttaatggcccggtgccggtggtgggtttgatttcgatattcgccatcatcccgtgttcgcggcaacgttccgccacctggctaagcaacggtagcggctcacctttaaacattttgctgtaccaactgcccgcatccacgcgcagtaaatcctgccagttcagttcacccgcgacgccccagccgttgctggtacgttcgagattgtcgtcatggagcaggaagatctcgccatctttgcttaacttcgcgtcaaattcgatcatcttatgaccgtattttgccccgacgtcgatactcgccagggtgttttccggggccagcttaccgccgccacgatgagcgacgatgcggggataaggccagttactcatactcgttgtcctgtttcaccatcaaaaagatgcagctgattttccgccagatgcagccacagcgtgctgcctgccgtcgggcgctcctgatgcgccagtcgcaccaccagcttctgctcgccccagcgtccgtgcgccaggttatctgcgccgaggatctccagcgtgtccatcaccatcggtacgccgccttctgcctggctgcttagcgcaatatgttccgggcgaatgccgagagtcattttacgcccggcatactgacggtagccaccgtttagcggcagctcaataccgccgtccagttcgaaatgcgtgccttcgttattcacgcggcctgtcagcaggttcatcgccggactgccgataaaactcgctacaaacaggctggcgggcttttcgtagacttcaactggtgtgccaatctgttcggcaacaccgccgttcatcaccattactcgctgggcgagcgtcatcgcttcaacctgatcgtgagtaacgtagagactagtcgttttcaggcgacggtgcaactgttgcagttcaagacgcatctgcacgcgcagcttggcatcgaggttagagagcggctcatcaaacaggaacaccgccggatcgcgcacaatcgcgcggcccatcgccacacgctggcgctgaccgccggaaagctcgcgcgggcgacgtttgagcagaccgtccagctccagaatgcgcgccgcttctttaacgcgctcggcaatttgctgcttgcccatgccgcgaattttcagcccccacgccatgttttcttcgacactcatatgcggataaagcgcgtagttctggaacaccatcgcaatcccgcgatcttttggctccatttcagtcacgcgctggtcgttgatccagatatcgccttctgtcacccgctccagcccggcaaccatgcgcagcagcgtgcttttcccgcagccagacggcccgaccatcacgataaattcgccatccgccacatcaagggtcagcggtttaatgacctgggttttaccatcccagcttttggttactgcctgtaatttcagtcctgccatcttatttctcactatcgaccaggccgcgcacgaaggcacgctgcatcactaaaacaatcaccaccggagggataagcgttaacaacatcgccaccatcacactgttccattccgtggtgccttcgcctgtagcgatcatccctttgatccctgccacggtggtgccgagatccacatcggtaataatcaacaacggccacaaatactgattccagccgtagataaaggtgatcacaaacagcgccgccagattagttttggagagcggaaaaacgatgtcgcaaaagaagcgcattgggcttgcgccgtcgatccgcgcggcttccaccagctcatccggcagcgtcataaagaactggcggaacaggaaagtagcggtcgcgctggccatcagcggcagcgttaaaccggcgtagctgtcgagcatctgcaggttggcgatgacttccaccgtcgggaagatacgtacttcaaccggcagcatcagggtgataaaaatcatccagaagaagaggttacgtagcggaaaacgaaaccagacaatggcaaatgcgctgagcatgctgacggtaattttgccgagcgtaatgctgaacgccatcacaaagctgttaagcaacatccgccagaacggcgcgctattcgtgcctaccccgttcacccagatgttgtggatgttttccagcagatgtgtgccggggatgagcgtcatcggcgcggcatagacggcctgtttatccagcgtcgccgcgacaaacgccacgtacagcgggaagaggatcaccgcgatcccgaggatcagcatggtatggctgaatatcgtcagccacggacggttctcaatcattggtaacgcaccttgctttcaacatagcggaactgcaccaccgtcagcacgatgacgaggaacatcaacaccacgctctgtgcggcagagctagccagatccagtccggtaaaaccttcgcggtagatcttataaatcagcgtcgtggtggcctgaaccggcccgccggacgtggcggcgtcgatcaccgggaaggtgtcgaagaaggcatacaccaggttcactaccagcaggaagaaactcaccggggcgataagcggcagcgcaatcttaaagaagcggcgaatcggccctgcaccgtcgatggctgcggcttcgatcaagctacggggaatggattgcagcgcggcatagaagaacaggaagttgtagctgatttgcttccatacactggcaaacaccaccagaaacattgcctgaccgctgttttgcgcgtggttccagtcgtagccgaactccgcgagaaaatgggtgatcagcccgcgaccggggttaaacaggaagatccacaatacggcggcaacggcgggagccacggcgtaaggcagcaacattaaggtttgatagaaacggctgccgcgcacgatgtactccaccagcgccgcaaagaacaggcttaccagcaaaccgctgacggtgacaaaggtgctgaattttatcgtcgtccagaaggagtcgagatagtagctgtcatggaacagcgtgacgaagttatccaggccgacaaactggctggagaaaccaaacggatcgacgctttgtaggctgtaccacaacgcttcgcccgcaggccagataaaaaagataacggtgatgatgagctgcggcgcgaccagcagataaggcagccagcggctgcggaacaccggacgggaactactcattacggttgattcctgaactgtgccggatgcgcttcgcttatccggcctacacgcgatgccaggtcagataagcgaaacgcatccgacattacactgattaagacttcgtgcttttctcaaagcggcgcagcaactgatttccacgctcaacggcggtatccagtgcctgctgtggtgtcttcttaccggtccacacgctctccagctcttcatccacaatcacgcggatctgcggcatgttgcccagacgcagccctttggtgaacggcaacggcggcttattcagcatctgacgcgtcgcggtatccgcccctgggtttttctcataaaagccctgctcacgggtcaggtcatacgctgctttggtgattggcagataaccggttttctgatgccactcggcagcgttttctggcttcgcgaggaaatcgaggaacttcgccacaccggtatacgtttctttatctttaccctgcatcacccacaggctggctccgccgataatggcgttttgtggcgcatctttcgcatcggcgtcgtaaggcatcatgcctacgccgtagttaaatttggcgtactcgcgaatgttggcaagagaaccggaagaggcggtggtcatcgcgcaatcaccgttatagaacttctcggtggattcatccttacgaccgacgtagctgaagtcgcccttcttgttcatctcctcgagcatggcgatgtgtttcacctgctccggcttattgaactccagcaccgcgtccgtgccgtcaaagccgttgtttttgctggcaaacggcagaccgttccaggcgctaaagttttccagttggatccagccctgccagccgctggcgtagccgcacttcatgccggaggctttcagtttcgcggcatagtccgccagatcctgccaggttttcggcggctgttccgggtctaatcctgctttcttgaaggcgtctttgttgtaatagagaacgggggtgctgctgttgaatggctgggagagtaagtggcccgttttgctgtcggagtagtaaccactaaccgtcggcacaaactggctctcatcgaactgaatccctgcctctttaaacacgtcatacaccggtttaatggctttgctcgccatcatggtggcggtgccaacttcataaacctgcaaaatagccggcgcgttgccggtacgaaatgcggcaatccccgcgcttaaattctgttcgtagttgcctttataggtcggtacaattttgtaatccgggttttcggcgttaaaacgttgggccagagaatccacctctttacccagttccccttccatagaatgccagaacggaatggtcgtcactgcctgtgcattccccattaacgccagtccgagcgccagtgcactagctgtataatgtaacggtttcatcgtttatctctcttgttgtaccgaatgcgcgaattcacgcgttttatgctcgcggggtaacatgacatgctcgaattacagaaaaataacttttttgttacatttgtaagatagtaaggtgtcagaaagatgacaaggcggtgacggcgtgggtgagggaaaatgggagatggggcacggataagcgggaaaatatagaaggtctgaatcaaactctacagattgctcatcgtttcatgccggatgcggcgtaaacgccttatcaggcctacaagatcgtgcaaattcaacatattgccactcacccagtaggcctgataagcgcagcgcatcaggcaattttacatttgtcacctgtctcaaaggagtcttttgactccctatcaatcaacgtgttattacccgcctaaatacgcacttctcaccgcttcattcgccagcagcgcatcaccagtatcggaaagcactacatggccgttttccagcacgtagccgcgatccgccagctttagcgcctggttggcgttctgctcgacgagaaagatagtcatcccctgctcgcgcagctgctcgatggtgtcgaaaatttgctggatgataatcggcgcaagaccgaggcttggctcatcaagcagtagcaaacgcgggttgctcatcagcgcacgaccaatcgccagcatctgctgttcaccgccggacatggtgcccgcccgctgaatacggcgctcatgcagacgtggaaacagctcatacacccactttatgcgctcctggaactggtcgcgttcagcaaaaaaaccgcccatcgccaggttctcttccaccgtcatccggctgaagacgcgacgcccttccgggacaatcgccaccgcttcgcgcatgattttcgctgtctgccagtcggtaatgtctttatcatcaaacacaattcgcccgctggtggcacgcggatcgccgcataacgtgccgagcaaggtggttttccccgccccgttcgcgccaatcagcgtgacaatctcgccctgattgatatgcaggctcacctcatgcagcgcctggattttgccgtagtgggcgctgactttgtcaaaggacaacatgactttttccatcttatgcctcacctaaataggcacggatcacgtccgggttattacggatctgctccggcgtaccgtttgccagcggcgtcccctgattgaccacgtaaattcggtcgctaattcccatcaccagcttcatatcgtgttcaatcaacaagatagtggtgttgtgatgattgcgcagttcggcaatcagctcatccagctctttcgtctctttcgggttaagacctgccgcaggttcgtcgagcattaaaatctccggctgcgtcaccatgcagcgggcaatctcaagacggcgctggtcaccataggccaggttactcgcctgacggttggcgtgttccagcaaaccaatgcgctcaagccaggtcgcggcgcggtcgagcgcttcgctctgggcgcgacggaaggatggcgttttcaacaggccagagaacagcccggttttcagttgctgatgctgcgccaccagcaggttttcaattaccgtcatttcacggaacagacgcacatgctggaaggtgcgcaccacgcccatgcgggcaatttgctgccccggtaaaccttccaggtgctgatcgcgcagtaaaatggtgccgccggtgggtttgtagaatccggtcagacagttaaaaaccgtggtttttccggcaccgttagggccgattaagctgacgatctcctgcgggtacagttcaagattgacgttgttcaccgccagcaggccgccgaagcgcatcatcaggccgttaacagataataatggctgactcatgcctgctctcctttcgctgcgccgtttttcagcttcagttgcgggcgcgtcatgggcagcaagccctgcggacgccagatcatcatcagcaccatcaaaccaccgagcattaacatgctgtattcgttgaaatcacgcatcaactcgcggctcaccaccagcaaaattgccgccagaatcaccgcaaattggctgcccataccgccgagcaccactatcgccagcacaaacgcgctttcggcaaaggtgaaggattccgggctgacaaagccctgacgcgccgcaaacagcgttccggcaaaaccggcaaacgcggcacttatggtaaaggcagtcagcttgatacgacgcgggcttaagcccaggctacggcaggcgatttcatcttcacgcaacgcttcccacgcacgccccagcggcatccgcagcaggcggttaatgacaaacaggcttagcaccaccagcagcaacgccaccaggtagaggaagatgacacgatcggagggatcgtatttcaggccaaagaaattactgaacgtgtcccagccgccttcacgagcggtacggctgaactcgagtccgaagagtgtcggtttcgggatctgactgattccgttcgggccgccggtaatttcggtgttattgagcagcaatatgcgcacaatttcgccgaaaccgagggtaacgatcgccagatagtcaccgcgcaaacgcagcaccggaaaaccgagcaggaagcccgccgccgctgccattaatccagcaatcggcaggcaggtccagaagcccaagccgtaatagtgattgagcagcgcaaaagtgtaagcgccgatggcgtaaaaaccgccgtaccccagcaccagcagaccagaaagaccaacaaccacgttcagcccgagaccgaggataatgtagatcatggtcagggtggcaatatccaccgtcccgcgactaaccataaacggccacgccaccgcaagcaccaacagcgccacgaggaacagtttctgcttcaccgtggagccatcaatggcgggcagaataaacttcggtccggaaacgcttttcaaccctttctggaaagccggtcgcaaaagctggaagaaaaagaccaccgccgtgccgataaacacccactgccaacggacatcgctagccgtgtcgaccaccagtttggtgccatccagctccagttgcacgcccataaagacgcccgccagcacaaagaacatcgcggcagagagcagcgccattgcaatatgcatcggtttcatactttctctacctccgggcgacccagaataccggtcggcatcaccagcagcaccagaatcagcagggcgaaactgaccacatctttatattccgtactcagataggcagaagagagcgcctccgcaatccccagaatcaggccgccaatcatcgctcccggaatgctgccaatcccaccgagcaccgccgcggtaaaggctttcatcccggccataaagccgatgtaggggttaatgacgccgtagaactgaccgagcagcacacccgccaccgccgccatcgccgcgccaatcacaaaggtcagcgcaatcacccggtcggtgttaatgccaagcagactcgccattttcagatcttccgcgcaggcacgacacgcgcgacccatgcgggaatagcgaatgaaaatcgtcagcgccagcatggcgaggaaggtaacaatccagatcaccgcctgcatggtggtaatagaggcagagaagttttcgctatgccccaccacccactgaccgttaaacaggctcggcagcgccacgtcgcggctaccttcggtcaggctgacgtagttttgcaggaagatggacataccgattgcagagatgagtgcaatcaggcgcttagagttacgcaccgggcggtaagccacccgttcgatactccagccgtaggcgctggcaatgacgattgcgccgacgaatcccgcagctaccagcagccagccggtatcaatgcccatcatcatcagcgcggcgatgatcataaaactgacgtagctgccaatcatataaacctcgccgtgggcgaagttgatcatgccgataatgccgtaaaccatggtgtagccgatggctatcagcgcgtaggtactgcccagcgtgacgccgttaaacatctgctgcaagaaatacaaaaactgctcagacataaggtaacctttctaaacccgcccgcattttacgggcggtgggatgatcacttggctgccgtggaactaccgtcggcgtgccactggaagacaccaaaatcaaatcccttaagatcgcctttttcatcccagttcagcggcccaatcacggtgtttgcaccgttagcttttaaatctttcaccagcgccagcggctcatcgctgccggtacgctcaagggcagtcgccagagattgcaccgccgcgtaggtgatccagacataaggcccggacggatctttcttgtctgctttcagcgcatcaacgatgccctggtttgccggatcctggtcatagcgttttggcatagtgaccaacatgccttcggcggcatcaccggcaatgttgctcaagctcgcattacccacaccttccggccccataaactgggttttcaggccaacggaacgggcctggcgcagcatctgccccatttccgggtagtaaccgccgtagtaaacgaagtcgatgttttcttttttcaggcgggcgatcagcgcggagaaatctttctccccggcggtaataccgtcgaagaagacgacgttggcgttagccgctttcagcccgtcctgcacgctacgcgccagcccttcgccatactgttgtttgtcgtgaatgatggcgatgcgctggggcttcaccgtctcaagaatgtattttgccgccgttggcccctgggaagagtccagcccggcagtacgcataatgtgttgataaccgcgttgggtcagctccgggttggtcgctcccgggctgatcatcagaataccttcgtcttcatagatatcactcgcaggctgggtagaagaagaacacagatgaccaataacgtatttaatgccgtcattaacgattttgttggcgaccgcaacggcttgtttcgggtcgcatgcgtcgtcatattccacgccaaccagtttatcgcccttaattccccctttggcattaatgtctttaattgcctgacgcgcgccgttaaattccatatcgccccactgggcaatcgggccggacatcgcgccgacaacggcgactttaatatcgtcagccatagcggtgtgactaattgccagtgcaatcatccctgcgatgatagttttcgcattccgtttcatagtcaaaaatccccattcgtgatgttgtgttgctttgtttttatgtgttaacaaatcagactgttctttttttatactgcactgtttttgcctgtctgattaaggggttagcgcagtattttgtgataatagcgattaaaatccctatttttcagtcgattaagaacagataatattctgaatttattgatagataaacagaaaaaagtgcctttgtcagcataaaataacggcacaaagggcggaataattcactatcattcaggggattatgctggacatttttcattctctaatgttttaattttgtaattattgctgttaaaaaattaatcacctgccaaaagaaataaaaaagagaaagcctccgattaaattatttcgctacactggttccacttttgtgatttacacgggttacccatgaagctgaccatcattcgattagaaaaatttagcgaccaagaccggattgacctgcaaaagatctggccggagtattccccttccagcttacaggttgacgataaccaccgtatctacgccgcgcgttttaacgagcgcctgctcgctgccgtgcgggtaaccttaagcggcaccgagggagcactggattccctgcgcgtgcgggaagtcacccgccgtcgcggtgtggggcaatatctgctggaagaggttttgcgtaacaatcctggcgttagttgctggtggatggcggatgcaggcgtggaagatcgcggtgtgatgacggcgtttatgcaggcgctggggtttacggcacaacagggcggctgggagaagtgttaatcgtcaagtttgatttcaaaagtgatattgcctgatgcgctacgcttatcaggcctacaatgtgtgttgcaatttactgatttctttggatcttgtaggccggataaggcgtttacgccgcatccggcatgaagcaacgtactcgatattagcaatttggcggcaacccaaagttgccgattaatgattacttcgcatcggtcgccgtgccgttggcgtgccagtcaaatacgccgaactcaaagcctttcagatcgcctttctcatcccaggtcagcggtcccattacggtatccacggagttcgctttcaggtatttggcgatttcagccggatcgtcagactgattcaggcccgcctgcaaagattgcagcgcggcgtaggtggtccaaacgaatgcgccacttgggtcctgttttttcgctttgatcgcgtcaacaatgggtttgttcgccggaacctgatcgtagttcttcggcttggtcaccagcagcccttccgcactttcgcccgcaatgttagacaggctaacgttagccacaccttccggccccataaactgagttttcagccctgccgcgcgtgcctgacgcaggatttgccccatttccgggtgataaccgccgtagtaaacgaagtcgatattctcttttttcagacgcgccaccagcgtactgaaatctttttccccggcggtgatgccatcaaagaacaccacgtttgcattgcctttcttcaggccgtcctgcaccgctcgcgccagaccttcgccgtattgctgtttgtcgtgaacgatagcaatacgctgcggtttcactttctcaagaatatatttcgccgccgtcggcccctggtcggagtccaggccggtggtgcgcaggatcagctgatagccacgggcggtcagctccggcgcggttgccgctggggtgatcattaaaatgccttcgtcttcgtagatgtcagacgcaggctgcgtactactagaacagaggtgaccaatcacatatttaatgccgtcgttaacgactttgttcgccaccgcaaccgcctgtttcgggtcacaggcatcgtcatattttacgatttgcagtttgttgcctttaatgccgcctttagcgttgatatccgcaaccgcctgctctgcgccggtaaactcctggtcaccgtactgcgcaaccggaccggacattgcgcccacgaccgcgactttaatatcttctgccagagccatattgctgaatgccagcgcgatacatcctgccagtaacgctttaccctttatgttcatcctgagaatccccattcttctggttattacgtgtgttgtgatgttgtttttcagcactttatttcgttttatgcatgactacccgtgctttagcagcatactctgctaaaacatacccgatttttatgatattggaatagctattttgacagtttattaacaatctgcgtggggattggcgttttgccggaggggaaattgattattacagaggcccaaaaaacaaaaaccccggactctcatccagggttctctgcttaatagcggaaattacgcttcaatggcagcacgcaattttttcatcgcgttcttttccagctggcgtacacgctcagcggaaacgccgtaacggtcagccagttcctgcaacgtggacttgttgtcttcgtccagccagcgcgcacggatgatgtcctggctgcgttcgtccagaccctgcatcgcgtcggtcagacggtttgccgcctgctcttcccagttatcatcttcaatgccgtcggcaaagttagaacttttatcctgcagatagagcaccggagccatcggctggctgtcggaatcgtcgtcggaagacaggtcaaaggtcatgtcctgtgccgccatacgactttccatctcacgtacgtctttgctggttacgcccagttcacgggccaccatttcgacttcatcctggttaaaccagcccagacgctgcttggttttacgcaggttgaagaacagtttgcgctgcgctttggtggtcgcaactttgacgatacgccagttacgcagaacgtattcgtggatctctgctttgatccagtgaacggcgaaggagaccaggcgcacacccacttccgggttgaaacggcgcactgctttcatcaggccgatgttaccttcctgaatcaaatccgcctgtggcaggccatagcccgcataattacgagcaatatgaacaacaaaccgcaggtgagacaggatcagcgttttagctgcttccagatcgccatggtaatgcagcttttcagccagcgcccgctcctcgtcagcgctcaacatcggccacgcgttagctgcccggatgtaggaatccaggttgccaactggggctaaagctaaactttgcattttgtcagtcattcaaatcctctcaatcgatatcttctggcgcttcagtggtagcaacaactgtgccagagcttaagagcaacgaggttatcattcactgttttatcagaccgtgattttatccacaagttcaatgcaagcttgtgaataaattacgcacaaaatgtgacatagagatgaaataccgggaagagacaacggggtctctttccctgctacggaacccattgcagggaaagagtataacacgcttttattattcaggcgtaaagtggcgtaaatgttgtaccgtggcaagccacgctgccacccagccaatcatgctgcataccagcagcaatagcaggcattcatcgaaacttaagccattgatatcaaacttcgttccgaaaacctgtgccacttccgcaaccgcgctactcaatcgcagcaccagaatttcactcaaaattaaactcaacaatgcgccagaaaatcccagcagtgcgccaccatacaggaacgggcgcaggatgaatccatctgtcgcaccaatcagtttctgtacgttaatggagtcacggcgagcaaagatactcagacgcacactgttaccgatgacgaggaacacggccgccaccatcaacacgccgatcatcgcgctaacgcgcccgaccagcccggtcaacgccgccagacgggcaaaccagctgtcatccatccgcacttcgtcaatgccgttaatctgcgtgatacgatcacgcagcgtattcagactttccgtcccctggaaatcgagtttcgggatcaccaccgccactgccggaagcgggttttcttccagcatatccagcgcaccaccaaaaccagaccagttacggaactcacccagtgcgtcttcacgagaaagatagttcactttctccacgccttgctcggcctgcaactgtgccaccacgcccgcagcagcgtcatcgtccagcgttttttgcagataaacagtgatttgcggactcggataatactgcgtcgccgcctggttaacgtttttgtacaccatataacagacgctgggcagcgtcagagaaatggcgataaccatcaccgttaaaaacgtggcgaacggtttgcttttcagatcctgcaatgcgccgtggaaggcatagcgcacctgttcgttgaaaacgttggttttgcgatttaccggttttgggctggatttcgcgcgttttggtgcgttacgaccgccgtcgccactgccgccgacgcttttacggaagcgatcaagacgcccgccaaactgccgaatatgattgattgcatcgcgcttattcatggcccacgcctccatgcaagtgaccatcgctcagggtgagcatgcgataggaacgccggctgatcaggttgatgtcgtgcgttgccatcaatacggttaccccaacgcggttaaactcttcaaacagacgtaaaatgccttcgctcagcgcgtcgtccaggttaccagtcggttcgtccgccagcagtaccgcgggcttgttcaccaccgcgcgggcaatgccaacacgctgttgttcaccgccgctaagctgaatagggaagttcttcgctttgtccagtagcccgactttatccagcgccgcgctcacccggcgacgaatatcgtcaccgctggcaccggcgataatcagcgggatcgccacgttatcgtagacagtacggtccatcagtagatggtgatcctggaaaatcatgccaatctggcggcgcagaaacggaacttcacggtttttcagacgcgtgatgtcatggccgctaaaccagattttcccggcgctgggccgctcaatcccacagatcagcttcaggagggtacttttccctgcgccggaatgaccggtcagaaacgccatctcacccggctgcatatggaacgtaacgccctgcagcgcctgtctcccaccgagataagccttgctgacatgttcaaagcgaatcattgttaatcctctcgggcaaaaagtgcctctataaagtcgtccgccttaaacggacgcaaatcctcaatacgttcgccgacaccaatgtagcggatagggataccaaactggtcagccacgctgaaaattaccccgcctttcgccgtgccgtccagtttcgttagcgtgatgccggttaagccaacggcttcatggaacagtttggcctggcttaccgcgttctgcccggtgctggcatcaatagtcagcataacttcatgcggcgcttcaacgtcgagtttcttcatcacgcggacgattttcttcaactcttccatcaggtggcttttgttctgcaggcgtccggctgtatcggcaatcaggacgtcgatattacgcgctttagctgcctgaatggcgtcgaagataacagaggcggaatccgccccggtatgctgggcaatcaccggaatattgttgcgctgaccccagacctgaagctgttcaaccgcagctgcacggaaagtatcacccgccgccagcatcacgcttttaccctgctgctcaaactgacgcgccagcttaccaatcgtcgtggttttacccacaccgttgacgcccaccatcaggatcacaaacggcgctttgccttcaacattcagcggctcatcgactttcgccagaatctcgcccatctcttctttcagcaggccatagagcgcctcggcgtcacgaagctgcttgcgggatgcgccttccgtcagattggtgataattttacgtgtggtttccacacccacatcggcgatcaaaagctgctcttccagctcctcaaacagatcatcgtcgatttttttaccgcggaacaggctgataaatccggaaccgagattttctttggtttttaacaggctgcgtttcaggcgcgcgaaaaaaccttctttggtcggtttttcctgctcctgagcgatttcttccaccggctgctcttcttctgccggaggaaccaccatcaccgcctcttctgccgcttcggcagccagcgccgtttccagctcttcgtcggtaatttcttctttagccgcttcttcttccgccgcttcgacaatctctacggtttccgcttcagcctgccactcttctgggctaaccgcttcggcgttgacgtcttccggcaacggcagctcttcacgttcgatagccactggctccggcgtttcttctacgaccggttccggctgtgcaacgacttccgcttcaggctgcgctttttcactttcagcaacctgttcagtgacttccacaacgtcggcagcaaaagtttccgcctcggcttcagtatgcgcttgcggctgctcttcaacggcttgttcagaggccttcacaggctcttgcgcctgaacgatttcttctacaaccggttgttcattctgaacttctgtctctttttccggggtctgctctttttgaccaaagcccagccaggaaaaaaagccacgttttttttctttcgccatttgcgactacactcctcgctgttgcttcatggcacagcgttaacgctatgtacatagcagctaaaaaaatgatgaaatagtctatcacttaacttaattcacatcaccgcctgcaagtatgtgttatctggcggattgagcaatttatcatgaaaaaaccgaatcattccggcagcggccaaatccgcattattggcgggcagtggcgaggccgtaaactcccggttcctgatagcccaggtctgcgccccaccaccgaccgcgtacgcgaaacgttgtttaactggctggctccggtcattgttgacgcccaatgtctggattgcttcgccgggagcggcgcgctggggctggaagcgttaagccgctacgctgcgggggcaacgttgattgagatggatcgcgcggtttctcagcagttaattaagaatctggcgacactaaaagcaggcaatgcacgcgtggtgaacagcaacgcgatgagtttcctggcgcaaaaaggtacaccgcataatatcgtgtttgtcgatccaccgttccgccgtggcttgttagaagagacgataaatttactggaagataacggctggctggctgacgaagccctgatttatgtcgaaagcgaagtcgaaaacggtctgcccactgttccagcaaactggagtttacatcgggaaaaagtggcgggtcaggtggcttatcggctgtatcaacgcgaagcacaaggagaaagtgatgctgattaatattggtcgtttgttaatgctctgcgtttggggatttttaatcctcaacctggtgcatcccttcccacgcccgctgaatatcttcgttaacgtggcgctgatttttaccgtgctgatgcatggtatgcagctggcgctattgaaatccactttaccgaaagatggcccgcagatgaccaccgccgaaaaggtacggattttccttttcggcgtgtttgaactgctggcctggcagaagaaatttaaagttaaaaaataaccttattgttcgcctacaaagctgacaaagcgcgttcctttatagctcagcgtacctttatcgcccactgtcagggcgtggtactgctgggcgtcgaggcgaaacgtctgctccattcctccgctttgcggtttgaagcttgcctcatagcgtatactggtgcctgccggagtcacttcctgctggcggctacggcgatcgttaatcggtttttcccgcttgttgctcaccaccaccagcttttgctggagcggagccatatcattatcagctttttcccgtcgctgttgcataaaacgaaagcttgcggcgacgacaattaagccaatgataacaataaagaaaagaggtggtttgctcatctttatccctcatcggaaaatgcggaaataagcataccctgccagttatggtgttgtcatccgtccaccctcgccactaaactggaagcaagaccgtaggcattccgcttacgaaaaaataacgaattcaaggaactaagatgctttggagctttatcgctgtctgtctttccgcatggctatctgtggatgcaagctatcgtgggccaacctggcaacgctgggtgtttaaaccgttaacccttcttctcctgctgttactggcctggcaagcgccgatgttcgacgccattagctatctggtgctggcagggctgtgcgccagtctgctgggcgatgcgctaaccctgttgccacgtcaacgtctgatgtacgccatcggcgcgtttttcctcagccacctgctgtacaccatctatttcgccagtcagatgacgctctctttcttctggcctctaccactggtgctgctggttctgggtgcgctgttactggcgattatctggacgcgcctggaagagtaccgttggcctatctgcacgtttatcggcatgacgctggtgatggtgtggctggcaggtgaactgtggttcttccgtccgaccgctccggcgctctctgcgtttgttggcgctagcttgctgtttatcagtaactttgtctggctggggagccactatcgccgacgcttccgtgcggataacgcgattgctgcggcctgctactttgccggtcacttcctgatcgtccgcagcctgtatctctgataaaacttgactctggagtcgactccagagtgtatccttcggttaatgagaaaaaacttaaccggaggatgccatgagcactcctgacaatcacggcaagaaagcccctcaatttgctgcgttcaaaccgctaaccacggtacagaacgccaacgactgttgctgcgacggcgcatgttccagcacgccaactctctctgaaaacgtctccggcacccgctatagctggaaagtcagcggcatggactgcgccgcctgtgcgcgcaaggtagaaaatgccgtgcgccagcttgcaggcgtgaatcaggtgcaggtgttgttcgccaccgaaaaactggtggtcgatgccgacaatgacattcgtgcacaagttgaatctgcgctgcaaaaagcaggctattccctgcgcgatgaacaggccgccgaagaaccgcaagcaagtcgcctgaaagagaatctgccgctgattacgctaatcgtgatgatggcaatcagctggggtctggagcagttcaatcatccgttcgggcaactggcgtttatcgcgaccacgctggttgggctgtacccgattgctcgtcaggcattacggttgatcaaatccggcagctacttcgccattgaaaccttaatgagcgtagccgctattggtgcactgtttattggcgcaacggctgaagctgcgatggtgttgctgctgtttttgattggtgaacgactggaaggctgggccgccagccgcgcgcgtcagggcgttagcgcgttaatggcgctgaaaccagaaaccgccacgcgcctgcgtaagggtgagcgggaagaggtggcgattaacagcctgcgccctggcgatgtgattgaagtcgccgcaggtgggcgtttgcctgccgacggtaaactgctcagtccgtttgccagttttgatgaaagcgccctgaccggcgaatccattccggtggagcgcgcaacgggcgataaagtccctgctggtgccaccagcgtagaccgtctggtgacgttggaagtgctgagtgaaccgggagccagcgccattgaccggattctgaaactgatcgaagaagccgaagagcgtcgcgctcccattgagcggtttatcgaccgtttcagccgtatctatacgcccgcgattatggccgtcgctctgctggtgacgctggtgccaccgctgctgtttgccgccagctggcaggagtggatttataaagggctgacgctgctgctgattggctgcccgtgtgcgttagttatcagtacgcctgcggcgattacctccgggctggcggcggcagcgcgtcgtggggcgttgattaaaggcggagcggcgctggaacagctgggtcgtgttactcaggtggcgtttgataaaaccggtacgctgaccgtcggtaaaccgcgcgttaccgcgattcatccggcaacgggtattagtgaatctgaactgctgacactggcggcggcggtcgagcaaggcgcgacgcatccactggcgcaagccatcgtacgcgaagcacaggttgctgaactcgccattcccaccgccgaaagtcagcgggcgctggtcgggtctggcattgaagcgcaggttaacggtgagcgcgtattgatttgcgctgccgggaaacatcccgctgatgcatttactggtttaattaacgaactggaaagcgccgggcaaacggtagtgctggtagtacgtaacgatgacgtgcttggtgtcattgcgttacaggataccctgcgcgccgatgctgcaactgccatcagtgaactgaacgcgctgggcgtcaaaggggtgatcctcaccggcgataatccacgcgcagcggcggcaattgccggggagctggggctggagtttaaagcgggcctgttgccggaagataaagtcaaagcggtgaccgagctgaatcaacatgcgccgctggcgatggtcggtgacggtattaacgacgcgccagcgatgaaagctgccgccatcgggattgcaatgggtagcggcacagacgtggcgctggaaaccgccgacgcagcattaacccataaccacctgcgcggcctggtgcaaatgattgaactggcacgcgccactcacgccaatatccgccagaacatcactattgcgctggggctgaaagggatcttcctcgtcaccacgctgttagggatgaccgggttgtggctggcagtgctggcagatacgggggcgacggtgctggtgacagcgaatgcgttaagattgttgcgcaggagataaggcaaaccgatcgcaacattgagcgcgatcggtcccctcgcccctctggggagagggttagggtgaggggaaaaggcggcatcgaagccaatcagcccctatcaaccgcctttacgaatcaaataacgataaggcagtccatccgtctctttagcaaccagttcgtgttccataaaggtacaaaacccaggaatatcgcgggtagtggccggatcgtcggcgataatcagcaacgtttcgccaggctgcatattgcgcacggttttgcgcaccatcatcaccggttccgggcagcgcaggccaagcgcgtcgagtgtgtggtcagggctggaaaagagatcggtcattttcttctcatcacttaaaaaaacggcgctagtttacgccctgtgagtccgtaagcaaactaggttaacgattgcgtgaaaattaaccattgcattgtcaacgtaaagcagtatcatgcggcggctcgaaaaaagggtaagcacgttattatgttaaggtaacagacgtgtcgtacgtattgggttccctcaccccaatggttaatcaaaaaggtacaatatgaacgttttcagccaaactcaacgctataaggcgttgttctggttaagcttatttcatctgctggtgatcacctccagtaactatctggttcagcttcccgtctccattttgggtttccataccacctggggcgcgtttagctttccgtttatttttcttgctaccgacctgaccgtgcgtatttttggcgcaccgctggcccgacgcattatcttcgcggtaatgatccctgcgttattaatctcctacgtcatcagcagcctattctatatgggttcctggcagggattcggcgcactcgcccacttcaacctgtttgtcgcccgtatcgccaccgccagtttcatggcctacgcgctggggcaaatcctcgacgtgcacgtttttaaccgcctgcgtcagagtcgccgctggtggctggcaccgacagcgtccacactgttcggtaacgtcagcgacacgctggcctttttcttcattgccttctggcgtagcccggatgcctttatggctgaacactggatggaaatcgcgctggtcgattactgtttcaaagtgttaatcagtatcgttttcttcctgccaatgtatggcgtattactcaatatgctgttgaaaagactggcagataaatccgaaatcaacgctttgcaggcgagttaaaggttcgttatcagagttgtgataagatggatgaatgagccgttatggccgtttatcgaaaggaagaagtcaatgcgcaatctggttaaatatgtcggaattggcctgctggttatggggcttgcggcctgtgatgataaagacactaacgctacggcgcagggtagcgtcgcggaaagtaacgctaccgggaatcccgtcaacctgcttgatggcaagttaagtttcagcctgccagcggatatgaccgaccagagcggtaagctgggaacgcaggccaataacatgcatgtctggtccgacgccaccgggcagaaagcagtcatcgtcatcatgggcgatgatccgaaagaagatctggcggtgctggcgaagcgtctggaagatcagcaacgtagccgcgatccgcagctgcaagtggtaaccaataaagccattgagctgaaaggtcacaaaatgcagcagttagacagtattatctccgcgaaaggccagacggcgtactcttccgttattctgggtaacgtgggtaatcaactgctgaccatgcaaattacgctgcccgctgacgatcagcaaaaagcgcagaccaccgcagaaaacatcattaatacgctggttattcagtaagttttaagaactactggcggcctcagggacgtgttccggaggccgtttttttaatcgccacgtcagtaataacgcgattgcgaccagtcccgccgccgccagataaatcaccggtacgcccgcccagctcatcaccagcccagccagtggtccagtcacgccaaggcttaaatccataaatacggtgtaagttgccagcgccgccccctgattttgctgcggaaccgcttttaccgccactacacccaatgccgggaacaccaggctaaacccggcccccgccagtaagacgccgattttcgccatccacggcatagtcgccacgccaaccagtagcaggccgattatctcaacgctaaagcaaatcatcgctacgtttaagccaccgatacggttaatgccgttagggaataacaaacgcgtaccgacaaacgcacagctaaacagcgtcagcgcgaaagccgcaccgtcccaacctttagcgtcataaaacagcgtgataaaggtggcgatgacgccaaatccggcggaagccagtgccagcgccataccgtacagccagacgcgcccaagcaccgcgcgaaacggcagcggtttgcctttactggcttttaccgtcggacgcgggatcgccaacaaaatggccaccagcgccacgcccataatgattaacgctaacgcctgcaagccgccccagtgataaaacacgacgcctaacggcgcacccatcgccatcgccccgtaagtgacaatgccgttccagctaatcacccgcccgatatgcaggctgccaaccacgccaacgccccatagggtgcttcccgttccggcaaaactttgcccaatcccaaggatgacgcgccccaggcaaagtaataacaggctgatgacaggcagactggcggttaatcctgccgtcagataccccagaccgctcaaaaagcagccgcataaaccgaagacgacaatctttttgggtcccaggctatcggcgtaacgtccggcatgagggcggctcagcaaggtggcgaaatattgcaggctgataaccaatcctgcccagaaggcgctaaagcccatcacatcatggacatagcccggtaatacagcgagcggcaacccgatggtgaggtagctggcgaagttaaacatgactatagagacaatgcgcaaattcaggcgcaatccgtttagcgcgggttcggctacgggttcgggcatgaggatcaccacatttttacaacagtgtttcatttttaccacgtgctgacgtgaaaatcagcagtaagaatcagaatattgctggcgtgactcccgctacacttaatacaaaaagtcacaaggaagccccaatggaaacccctcaacccgataaaacgggcatgcacattctgctcaagctggccagcctggtagtgatcctcgcgggcattcacgcagcggcagatatcattgtgcagctgttactggcgctgttttttgccatcgtcctcaacccgctcgtcacctggtttattcgtcggggagtacaacgccccgttgccattacgattgtagtggtggtgatgctgatcgcactaaccgcgctggtcggcgtactggcggcaagctttaacgaatttatctctatgctgccgaagtttaataaggagctgacgcgcaaactttttaaattgcaggagatgttgccttttcttaatttgcatatgagcccggagcgaatgctgcagcggatggacagcgaaaaagtggttaccttcaccacagcgctaatgaccgggctttccggggcaatggcgagcgtgcttttgctggtgatgaccgtagtttttatgctgtttgaagtgcgccacgtcccttacaaaatgcgttttgcgctgaataatccacagattcacatcgcgggattacaccgcgcacttaaaggcgttagccactatcttgcattgaagacgctactcagtttatggacaggtgtcatcgtctggctggggctggagctgatgggggtgcagtttgcgctgatgtgggcagtactggcgtttttgctcaactacgtgcccaatatcggcgcggtaatttccgccgtaccgccaatgattcaggtgctgctgtttaatggtgtttacgaatgtattctggtcggcgcattgtttttagtggtccatatggtcatcggcaatattttagaaccacggatgatgggccatcgcctggggatgtccaccatggtggtatttcttagtttgttaatttggggatggctgctcggcccggtagggatgctacttagcgtgccattaaccagcgtgtgtaaaatctggatggaaaccaccaaaggcggtagcaaactggcgattttactggggccgggcagaccgaaaagtcggttaccgggatgaggcgacaagtgatacgatacgcactttcattttccattaaacgttggccctgatatgtatcggatagttctggggaaagttagcaccttaagcgcagctccactgccaccgggtttacgcgagcaagcaccgcaaggtccacgacgcgaacgctggctggcggggcgtgcattgcttagccacacgctttccccgctaccggagatcatctatggcgaacaaggcaaacctgcatttgcgccggaaatgccgctatggttcaacttaagccatagcggtgacgatatcgccctgctgttgagtgatgaaggcgaagtcggctgcgatatcgaagtgattcgcccgcgcgccaactggcgctggctggcgaacgccgtattcagcctcggggaacacgctgagatggacgccgtgcatcctgatcagcaactggaaatgttctggcgcatctggacgcgcaaagaagccatcgttaaacagcgtggcggcagcgcctggcaaatcgtcagcgtagacagcacctatcactccagcctgagtgtcagccattgtcagcttgaaaatttaagccttgcgatctgcacccctactccctttacgctcaccgccgacagtgtgcaatggatcgatagtgttaactgatccgcccacccgactgcccatctattgatccagaacaggtaatcagtatgacgaatacttaaaatcgtcatacttatttccgccatctattttaatccattggggttaccatgctctccacactccgccgcactctatttgcgctgctggcttgtgcgtcttttatcgtccatgccgctgcaccagatgaaatcaccaccgcctggccggtgaatgtcgggccactaaacccgcacctttacacgcctaaccagatgttcgcccagagcatggtttatgaaccattggtgaaatatcaggcagacggtagcgtgatcccgtggctggcaaaaagctggactcatagtgaagatggtaaaacctggaccttcaccctgcgtgatgacgtgaaattctccaacggtgaaccgctcgatgccgaggcggcggcagaaaacttccgcgcagtgctcgataaccgtcaacgtcacgcctggctggagctggcaaaccagattgttgatgttaaagcactcagtaaaacagagctgcaaattaccctgaaaagcgcctactatcctttcctgcaagaactggccctgccccgtcctttccgttttatcgctcccagccagtttaaaaaccatgaaaccatgaacggaattaaagcgccgattggcaccggaccgtggattttgcaggaaagcaaactgaatcagtacgatgtcttcgtccgtaacgaaaactactggggcgaaaagccagcgattaaaaagatcacctttaacgtcatcccggacccgactacccgcgcggtggcgtttgaaactggcgatatcgacctgctgtacggaaacgaagggttattaccgctcgataccttcgcccgctttagccagaatccggcttaccacacccaactgagtcagccgatcgaaaccgtgatgctggcgctcaataccgccaaagcccccaccaacgagctggcagtacgtgaagctcttaattacgcggtaaacaaaaaaagcctgattgataacgcgttgtatggcacccagcaggtcgccgacaccctgtttgccccttctgtgccctacgccaacctcggcctgaaaccgagccagtacgatccgcaaaaagcgaaagcgttgctggaaaaagccggttggacgctgcctgcgggcaaagacatccgcgagaaaaatggtcagccgctgcgcattgaacttagcttcatcggcaccgatgcgttaagcaaaagcatggcggaaatcattcaggctgatatgcgccagattggcgcagatgtcagcctgattggcgaagaagagagcagtatctatgctcgtcagcgcgacggtcgttttggcatgattttccaccgcacctggggcgcgccatatgatccacacgccttcctcagtagtatgcgcgtaccgagtcacgctgacttccaggcacagcaaggattagccgacaaaccgctgattgataaagagatcggcgaagtgctggcgacccatgacgaaacgcaacgtcaggcgctgtatcgcgacattctgacccgtctgcatgacgaggcggtttatctgcctatcagttacatcagtatgatggtggtaagtaaaccggagctgggtaacatcccctacgcgccgatcgccaccgaaattccgttcgaacagattaaaccggtgaaaccttaatgttgcgttacgtattacgccgctttctgctgctgatcccgatggtgctcgccgccagcgtgatcatttttctgatgctgcgcctcggtaccggcgacccggcgctcgattatttgcgtctgtctaacctgccgccgacgccggagatgctggcctctacccgcaccatgctgggactggatcagccgctgtacgtccagtacggcacctggttgtggaaggcgctgcatcttgactttggtatcagtttcgccagccaacgcccggtactggacgatatgctgaacttcctgcccgccacgctggaacttgcaggtgcggcgctggtattaattctgctcacttccgtaccgctcggtatctgggcggcgcgccatcgcgaccgtctgccggatttcgccgtacgtttcatcgcgtttcttggcgtgagcatgcctaacttctggctggcgtttttactggtgatggcgtttagcgtgtatctgcaatggctacccgcgatgggttacggcggctggcagcacatcattttgcctgcggtttccattgcctttatgagcctggcgattaacgcgcgtttactgcgcgccagtatgctggacgtcgccggtcagcgtcacgtcacctgggcgcgtctgcgcggcctgaacgacaaacagaccgaacgtcgccacatcctgcgcaatgccagcctgccgatgatcaccgccgtggggatgcatatcggcgaactgattggcgggacgatgattatcgaaaacatctttgcctggccgggcgtcgggcgctatgcggtgagcgcgatttttaaccgtgactatccggtgatccagtgctttacgctgatgatggtggtggtttttgtggtctgtaatttgattgtcgatttgctcaacgccgcgctggacccgcgcattcgtcgtcatgaaggagcgcacgcgtgaactttttcctctcttcccgctggagcgtacgcctggcgctgatcattatcgccctgctggcgctgattgcgctcaccagccagtggtggctgccgtatgacccacaggcgattgatttgccgagccgcctgcttagcccggatgcgcagcactggctgggcaccgatcacttaggtcgcgatattttcagccggctgatggcagcgacccgcgtgagcctcggtagcgtaatggcctgcctgctgctggtgctgacattagggctggttattggcggcagcgccgggttgattggcgggcgcgttgatcaggccaccatgcgcgtcgccgatatgtttatgaccttcccgaccagcattctgagcttctttatggttggcgtgctcggcaccgggctgaccaacgtaattatcgccatcgccctgagccactgggcgtggtatgcacgcatggtgcgcagcctggtgattagtctacgccaacgcgagtttgtgctggcgagtcggctttccggtgcgggccatgtgcgggtgtttgtcgatcatctggcaggcgcggtgatccctagcctgctggtgctggcaacgctggatatcggccatatgatgctgcacgtcgcggggatgtctttccttggcctcggtgtgaccgcgccgaccgccgaatggggcgtgatgattaacgacgcgcgccagtatatctggacccagccgctgcaaatgttctggccggggctggcgctgtttatcagcgtgatggcctttaacctggtgggtgacgcactgcgcgatcatctggaccctcatctggtgacggagcacgcacactaatgccgcaacagattgaactacgtaatatcgcgctacaggccgcgcagccgctggtacacggtgtaagcttaaccctgcaacgcgggcgcgtgctggcgttagtcggcggtagcggcagcgggaaaagtttaacctgcgccgcaacgctgggcattttgcccgctggcgttcgccagacggcgggggaaattttagccgatggcaaaccggttagcccttgcgccctgcgcggcatcaaaattgccaccatcatgcagaacccgcgcagcgcctttaatccactgcacaccatgcacacccacgcgcgggaaacctgcctggcgttagggaaacccgccgatgacgctacgcttaccgctgccatagaagcggtggggctggaaaacgccgcgcgcgtgctgaagctgtacccgttcgagatgagcggcggcatgttgcagcgcatgatgattgcgatggcggtgctgtgtgaaagtccgtttatcatcgccgatgaaccgaccaccgaccttgacgtggtagcacaggcgcgcatcctcgatctgctggaaagcattatgcaaaaacaagcgccgggaatgctgctggtgacccatgatatgggcgttgtggcgcgtctggcggatgacgtggcggtgatgtctgacggtaagattgtcgaacagggcgatgtagaaacgctgtttaacgcccccaaacatacagtgacgcgcagcctggtttccgctcatctcgccctctacggtatggagctggcaagttgacctaatacggtatggagctggcatcatgactttacttaacatctccggcctttcccatcactatgcgcacggtggatttaacggaaaacatcaacatcaggcggtgctgaataacgtttccctgaccctgaaaagcggcgaaaccgtcgccctgctggggcgcagcggctgcgggaaaagtaccctcgcgcggttgctggtgggtttagaaagccccgcgcaggggaatattagctggcgtggcgaaccgctggcgaaactcaatcgcgcccagcgtaaagcgttccgccgcgatattcagatggtatttcaggactccatcagcgccgtgaatccgcgcaaaaccgtgcgcgagatcctgcgtgaaccgatgcgccacctgctaagtctgaaaaaatccgaacaactggcgcgcgccagcgaaatgctgaaggcggtcgatctcgatgacagcgttctcgacaaacgcccaccgcagttaagcggcggccagctccagcgcgtctgcctggctcgcgcgctggcggtcgaaccgaaactactgattctggatgaagccgtttctaaccttgatctcgtgttacaggcgggtgtcattcgcctgctgaaaaagctacaacaacagtttggcaccgcctgcctgttcatcacccacgacttacgcctggtagaacgcttttgccagcgggtaatggttatggacaacggacaaatcgtcgaaacccaggtggtgggagagaaattaaccttttcctctgacgccggacgtgtgctacaaaacgcggtattacccgcattccccgtgcgccgtcgcaccacagaaaaggtttaacgcaaatgcaacgagtcaccatcacgcttgatgacgatttactggagacgctggacagcctgagccagcgtcgtggttataacaaccgttccgaagctatccgcgacattctgcgtagcgccctggcgcaagaggccacccagcagcacggcacgcaaggtttcgcggtgctgagctatgtgtatgaacacgaaaaacgcgacttagccagccgcattgtctccacccagcatcatcaccacgacctctccgtcgccacgctgcatgtgcacatcaaccacgacgactgtctggaaatcgccgtgttgaaaggtgacatgggtgacgtgcagcattttgccgatgacgttatcgcccagcgcggcgtgcggcacgggcatttgcagtgcttgccgaaggaagattgagttacgccattgtcccaatcgtcttcctgaatcgcagcagcgcaatggtgaaaaatgcgccgccaattgccatcagcgtcagaaactgcggccagacgatttcgaatccggcaccccggtagaggatggcctgcgcgaggctaacaaagtgtgtcgtcggcatggtcagcataatgtcctgcaccatctgcggcatactttcgcgcggcgtggaaccaccggaaagcatttgcagcggcagcagcaccagaatcaccagcagccccagttgcggcatactacgcgctatcgtccccataaaaatgccgatactcgtggtggcaaacagactgagcgccacgcccagcataaacagcgggatgctgccttcaatcggtacgcccagtacacctttcaccatcagcaccaggcttaatccgcttaccaccagcaccaccagccccatgctccagatcttcgccatcatgatctcaaacggcgttatcggcatcaccagtaagtgttccaccgtgccgtgttcacgctcgcggatcagcgcgcttccggtcaatacaatcgccagcatggtaatgttgttgatgatcgccatcaccccgccaaaccacgcgggatcgaggttcgggttaaagcgcatccgggtttccaggcttaccaacggttcgctgttatcacggtagcgcgcgacaaagctgttcacttcaccgttgataatattctggatatacccattgccggtaaatgcctggctcatgcgcgtggcatcgacgttcacctgaatatccggctggcgtccggcgaggacatcacgctgaaaattaggcggaatatttatcgcgaaggtatagcgtccggcgtccagtccggcatccatctcatcggcggtgatcatctccggtggcaaaaaccacggacgatagaagctgttaacgatccggttgcttaactggctttgatccatatcggcaatggcgatcggcgcgaggttcaagcttcctggcgtaacggtcgcactgctatacacgctcaccgtaaagctgaagacaatcagcgtcagcatcgctttatcaccgagcagactgcgcaactctttgatacccagattaaaaatattgcgtaaatggcgcatcatccctcctgttttttcagcagcaggatacttaagcccatcaccagcgggatggctatcagtaacgggataaaaagttgccacaaatcagtcagatccagcgctttgctgaacgtcccgcgggcgatagtcagaaaatgactggtcgggtaaacctcgccgatccaacgtccaggcccttccaggctagctaccggatcgatcatcccggaaaactgtgtcgccgggatcaacgtgataatcgccgttccgaaaatggcggcaatctggcttttcataaaggtggagatcagcagccccattccggtggcaatgatgatatacagcagcgccgccagggtgagcgtcaggaaactgcctttatgcggtacgccaaacacaaacacgctcaggccgcagagcaggaaaaagttcagcatccccagcgcgatgtatggcaactgtttaccaagcaaaaattcactacgcgtggtgggggtcacgtaaaggttgataatgctcccaagctctttttcccgcaccacgctaagggcgcttagcatactcgggatcatcatcagcagaagcgggatcaccgccggaacaatcgctggcaggctttttacgtccgggttatagcgatagcgcgtctcaatattcatcagcccgctttggctggcgggtgtgctttgtcggctcgccacatcctgtaaccagctctggtgcatggcctgcacgtaaccttttaccgtttcagcacggctcggcatcgctccgtcgatccagacgccgagttccacaggcgtaccacgcgcgatatcgcgcccgaaattgggcgggatctcaatcgccaccgtgatatcgcccgcacgcatccgacgatcaagctcgtcataactggtgagcggcggctgttcgataaagtaacgggaaccggagaggttgagtgtccacgcctggctactgacggtctggtcgcggtcgagcaccgcaaagcgcaggttttccacatccatactgatgccgtaacccattatcagcatcaggatcaccgttcccatcagcgccagcgtgctacgtactggatcgcgtcgcagttccagcgcttcgcggcggctgtagctaaacagacggcgcaggctaaatccctgacgcggcgcgtgggtggtgtcgtgtaccacgggcggcgcttcggcttcgttgctctgccctgccgcttcctgcaaataggcgataaatgcctcttccagactggcggctccgcgtttctcaaccagttcctgcggtgtaccgctggcaagcacttttccggcgtgcatcagactgatgcggtcgcaacgttccgcttcgttcataaagtgggtggagatgaagatagtcactttgtcctggcggctgagatcgaccatcaactgccagaacatatccctcgccaccggatcgacaccagaagtaggctcatcgaggattaacatctccgggcgatgaatcaccgccaccgccaggctaagccgctggcgaatgccgagcggcaaactctccggcagaatatcttcaacgtcgttgagcttaaaacgctcgctcatttcagccactcttgcgggaatttccgcttccgggatgtgaaacaaacgggcatgtaactcaaggttttgccgcacggtgagttcgttatagaggctaaacgcctggctcatatagcccacccgacggcgggtatcgatatcttttggatcaaccggttgcccgaacagccacgcctcaccttcgctggcgggcagcagtccggtgagcattttcatggtggtggatttaccgcagccgttgctaccaagaaaaccaaaaatctccccgcgtggaatgcggaaattaacgtgatcaacggcaacgaaggaaccaaaacgcatggtcagatcgcgcgcttcgatggcaatctctgcgttttcaggttgatacggtgggatcactaccgcctgatgcgcctggcgttgcgcttgcggtaacagatttataaatgcttcttccagcgtagcgctttgcgtttgctgccgtagctcttcggcgctgccagttgccagcacttctccggcattcatcgctaccagccagtcgaagcgttcggcctcttccatataggcggtggcgaccagcacgctcatattgctctgccgctggcgaatactgtcgatcagatcccagaactgggagcgggagagcgggtcaacccccgttgttggctcatcaaggatcaacagttccgggtcgtggattaacgcgcagcacagcccaagtttttgcttcatcccgccggagagtttccctgccggacgatcgcgaaacggtgctaacccggtgctggtcagcagctcattgattcgcacttcccgctccgctttgtcgtgaccgaacaggcgagcgaaaaaatcgacgttttcatacacgctcaaggtgtggtagaggtttttgcccagcccctgcggcatccaggcgatgcgcgggcagacgtcgcggcgatgcttcgggtcgcgcatatcgccgcccagcaccatcacattgccctgttcaatgacgcgggcaccggaaatcaagctcaacaagctgctcttcccgacgccgtccgggccaatcagcccgaccatacagcgggccggaatatcgagagtgatattgttcagcgcaacggtttttccataatgctggctcacgcccgccagttgcgcgacaggcgggacgggaaccagttccagatgcgtcattgcggcaacctcaccacgaggtcgtcaggccacggaagttcttcattcacccgcacccacgctacgcccggcaaaccggttttgacatattccagatgctgctggagtaattccggtgggatacgcgctttgacgcggaacatcagtttcagccgttcatcgctggtttcgacggtttttggcgtgaactgggcgacactggcgacaaaactgatggttgcaggaatacgcagatctggcgcggcatcgaggatcagccgggcttcaccgcccagtttcagcgtgcccgcctgttcggttggcaggaagaaagtcatatagacgtcgctgagatcgaccatattcagcacccgaccgcctgccgccagcacttcgcctggctcggcaacccgatactgcacgcgtccgtcacgcggggctttcagttcgctgtcatcgatatctgcggcaatgcgccgttcagtggcttgtgccgcttcgacgcgggtttgcgcctgaatgatattggtgcgtgccgcttctatagccgctttagaagcgcttacctgagctttcgcgctttccagcgcagctcgggcgctctcagcggcggcgcgatcgtcatccagctgttgcgcagaaatagcccctcgttgggccagactacgggaacgcgtatgacgttttgctacggagtccagttctgcctggcgttgattaaccaggctctgtgcggcacgagtttcgctttgtcgttgctccagcaaagcctgcgcggcagcaacggcgctttgtgcctctttgatttgcgcgatggcttccagtcgctgttcctgcaacacgcgagtatccatcttcgccagcacttcaccttcgcgaacaaacttgccttctttcaccagaatggtgtcgatacgcccggcaattttgctggcaatatccacttccgtcgcttcaatgcgcccattactgacagcaaagccttccggcacacctgccgggcgcaacagccaccacgccacgatagccgccaccgccagtaacccgacaacccaccacgccagatggcgcttactcttatccataatcgacccgccataatccctgtaagcaaacgacgcgtgttacaactgccgccgaacgacgttcagcggattcttccatccgggataagaaggaaacggcaaatacgaccagcgcgcagagcattgagcgccaacggggaaggcttagtgaaaacgggtagtaatgttgtcatcatcagcattcctggccgtaaatgaaacacgcatactcataagtgtgatctataaaactggctgacaaaacggtatccatcctgttggatagcgtttcacgcctgttcagttgcaggaacagagcattcctttttacgttttatcaacagtctcaaccagatagtaacattaatattcatgttgtctatggttcagagctgtaacattgtgcgccttctaatcaaaggcataagtccatttctgtttttttcatgctggtaagacttccagggagtggttatctcaggccctgcaccagggttaatttggcaattatgcatgctgaacattcttccagcatgtttactgtcacgggcgttaagacctaaaactgtccccgtttcgcctatgcgttctcttccaccatttccgttatgtgcaacaacttgatttatacctaacatttgactacatgctaatagtgcttcaagtttaggtctgtaatctgtgctaacagaaaaataacgattaaaggatcgacaagagatagcccggctagttttaaactttttgccattaattatagcatgatgctttttattgataattgccgctaattcgaccggatcgagagcattggtcatttcatcaatagagactgttatcggtcctataatgtaacgttttcgctgatcatcaaaagttatcccatgatgatttgccattattttgtatttggggtcatagaaacatacaggataatcttttatcccagagtaggtatcctcatcgagtggtttcatacgcgtgaagttctgcatatagttaccattgcaattcgtttcatgatttccagctaatacatgaacattttcattgatactcattatgcgttttaacaaatcgatgataaattgatcaccacagatattgctaaatcgatcgccggtttggtcgcccagaaacgtacatggcgtcacagcgtctttattaataactaaataaggctgaagactttctaaaataatgtctcttctgttcaggatactgattattgtattaacattagtgttaagttgctcattaaagttctcccttagcaatacgttgagaacttcatcttctatattaagcaactggctaaggaaattttctccttcagccatgattcccaaatgtcccgttgcgaaaagcgcgaacaaaactgcaccgacactgccatcggtatcaccaaaataggttggtctggtacttgtgggatcaacgggtaaacaattggagaaatagattctgtcagcgaactggggttttatcattgtttcgaatttaatatcagatacattatattggcttattttccagttccagatgggtttgtagctctcagtaactgcaacatcattagcattatcatttactgtcatattattaagtaaataaacaatactgcaccaattaatatcggtattatcaagagagcaaccgtaatttttgctattaattgtcacaataaactgataattattattcctacgtagaatatgagcacgcatgccgcttagcatactatatttttcactatgatccgtttgtatggtaaaactaattttgtcatcttgaatagattgttggaaccgttctatttgccaatcatctattttttccacaacctcaccgagcattgtcctggcaatactacttatatcatcacctataccatttgcaatatacccaaacagttctttagtgaagttggtaacatgctcttgcaccatatcatttgttgcgattgtcgttgtactgtcgttagtgcctgccacagttccaattttcatattttacctcatattatttaccgcgaggaatacatagttaacattttatcttatgacatacacctcatgttcgatgggaaaataattatattttgcacaaatcattcagcctcaaagcataatatgaaatttcttatctcatagcagagaaagtccctaaagattgtagaggcgtcatcagaacatgcctctacaatcgattaagaaaacctatgaaatactggcaggattaaaaagacataccaccgtattcatggagttttaatgtagttgaaaacaactaagcccactggaataaattattttattatttttatcacgtgcttccttcagggaatttagccccataataccattatcaaattgttgattatgatctaccccgggcccatgatgcccatatttttgtctaatgtatttgctggggtcttcacctttgagtgtctccccacatatgaagatacgttcacgtgctggtctgaaatcagtagtgttatcaaaataattagcatatacaggtgtgggtttcaaagtattgcttcggattagatggaatagaggatcatccatgtgttctttatgttttttattaaaaatattggctaattcctcaggatcagtaggatttttcatctgattaaatggaacctgcaaagcacgctgacaataacatttttttcttcatctcttattattccgtgatgactggttaaaacttgcctttcactgtcataattacaaacatcgagcgttttaattaagttatacgtatcaccggcagagagtttatgatttgctagtcgtgcagtatagttaccattaaaattgatttcatgatttccagccagaacgacgacatttttattaatacggctatctttattaccctccatatttcgcatagaatttagcaaagtaaggatatatttatcaccaaaaatagtactaaatctatcgcctgtatgatccccaaggaagatacaaggggttatcgcatcgtcctttaaaaaaacatgttgatgcaactcattcaagatcatgtctctcgtatttaataaatcgtagagcactttattatttttatgtttgtatgcagaactagccatctcttcgtgttttaataattcacataataaactccaacccttttccctgatgcctatatgcccactaacgagcaatgcataaagtacagcgcctactcttccatctgtatcgccaaaataagccgtgttggcattttgtgggttaatcacgccacactgtttatagaagtctattttactaaacacagatttaacatagctatcaaacttttccttagtaaacgtctctttagagacatcccaacgccagtcaggtttgaaattaccactaagaagagtaaagaaatttctcgctatgatagaaagcccatcaactttataaattatatcacttttatctccagaggaattaataaaataataaccgcccttacactcaacagtaacggtaatgggagagcttaattttaacacatggttattgtctggtataattgtaaagataaacgtatcagtagtattgtcggcgaatctattatattcttgaatatctatagaaggttcactattataaaaccatactttctccatctggtgactacgatcatttaccttccagtgaccatgttgcaggaaatagatgatatgcaggccaaaatcgttatctatttggctatcattatccagtttatcaaattcaactatctttgcacgatgtgttttatcaaccttgccatggtgttgatgactgttaactttatcactatgcttatcttgatggctactagagatgtttctaatctgattgtcaattgctttcataaataacctgtgatatttttgaattgtttgtaacaaaataaatgatacttgtctgaaaaacagatttacgacgatataaaataataatacttatatgttcgctgattttaagcaccgagactatccggtcttttaccaaataatgaagaataatccctccctggaagataattgtaaaaaacaacagcataagaattaatcttaggataaatttttatttatcatggccttttgaacgctgaaaagtagcgctctgcaaagtaaaccccgctatagttatgctatgcatttgtctttaatgatatctcgtcattatattaacaggatgaaattatcattaatgcatatttcaatattagcagggatacctgaggagtttaaagtgaacatatatatcgggtggcttttcaaattaatccctttgattatgggcttaatttgtatcgcgttaggtggctttgtgctggaaagtagtgggcaaagcgagtatttcgtcgcgggtcatgtgctgatttctctggcggccatatgcctggcattattcactaccgcatttattatcattagccagctcacgcgcggcgttaatacgttttacaatacattgttccccattattggctatgcggggagtattatcaccatgatatggggttgggcactgttagcaggcaatgatgtgatggcagacgagtttgtcgccggccatgttattttcggcgttggtatgattgccgcctgtgtaagcacggtggcagcgagttccggtcactttctgctcattcccaaaaatgcagcggggagcaagagcgacggaacaccggtacaggcttattctagtttaatcggtaactgcctcattgccgttcccgttttactcaccctgctcggtttcatttggtctattacgctgttacgtagtgctgacataactccgcattatgtcgcgggtcacgtattgcttgggttaaccgcaatctgtgcctgtctaattggccttgttgccacaattgtccatcaaacacgtaatacgtttagtactaaagaacactggctgtggtgttattgggttatttttctcggcagtatcacggtactgcaggggatatacgtcttagtcagttccgatgcaagcgcccgactggctcccggcattattcttatttgcctcggaatgatctgttacagcatattcagtaaagtctggctactggcactggtatggagacgtacctgtagcttagccaacagaataccgatgattcccgtcttcacctgcctgttttgccttttcctggcaagctttcttgcggaaatggcgcagaccgacatgggatattttattcctagccgagttctggtcggtttgggagcggtatgctttacgttgttcagtatcgttagtatattagaagcgggttctgctaaaaaataattgcaacgtaccggataaaaccagcgttgaccatttgcgtaacgctggtttttcttaggcatcatgaaataacgcagcattaatgcatagtggttaagtataaaaaacagcaaagttactgtttttttcaacctgttcatatttcataaagatctggccactgagtgagttttcaatcacctttccatccaccttatattaagcatggagggtttcagttcacgggctcattagaaaataatcacaagataaccactatcaaaattagctcatttttaatgcgactctaataattttcatctttaggaaataggtcaggagctctttgctgcaatcaaatcctgcgcacaagcccacgcactgctccacgcccactggaagttatagccccccagccagccggtgacgtccatcacttcgccgatgaagtacagcccaggcactttgcgcgcttccatcgtccgactagagagttcgttggtgtccacgccgccgagcgtcacttcggcagtgcgatagccttcagtgccgttgggttgtacgcgccagtcggtcaatgtgctaatcagtgcctgttggtcacgcacgttgagctgttttaggctaacatccgggatttgcccgagttgctgtaagcgttcaaccaaccgcttcggtagatgaaccgccagtgtgtttttcaggctttgattcggatgtgcgttacgctgctcattcaggaaggtttcgaggtccacatccggtagcagattgatgctgacaaattcccccggttgccagtagctactaatctgcaacaccgccggtccagacaagccgcggtgggtgaagagtaagttctcacggaaaacggtgccgttttcagcggtaatcacggaaggcaccgccacgcccgccagcacctgtaactcttcgagcaacggtttatgcagagtgaatggcaccagacccgcgcgggtcggcagcacgttgaggccaaattgttcggcaatcttataaccaaacgggctcgcgcccagccccggcatactcagcccaccagtcgcgatgaccagcttttcgcaaccgacagtcatgccgttcagatcaagcgtgaagcctgtttcatccttcgccacactcagcacttcgctacgcaatctgaaggtcacattgcccttctcgcactcatccaccagcatgtcgacaatctgctgcgcggagtcatcgcagaagagttgccctaacgttttctcgtgccaggcgatgccgtgtttattgaccagatcaatgaaatcccactgggtaaaacgtgcgagtgcagacttacaaaaatgcggattctggctcagataagcgcctggttcgacataaaggttggtaaagttgcagcgcccaccgccagacataaggattttgcgccctggttttttaccattatcgatcagcagaacccggcgtcctgcctgacctgccagcgcagaacagaacatacccgccgcaccagcgcctataataatggcatcaaacctttccacgttgcgctcctcttagaaaaaacgggcgtgaattgtaaagattcctcagtggtcgcaccagcatcaatattactaaaaggaagtatttgcctgaattatataagataattattttttgagtgaaatccatacagggggcaaatcaaaaaaagtctatatttcactttgcccgcgccgcgaaagtcactgataatgcgccgcgttcatgtcctcaaaatggcgtaacgtcctatgctacatttgtttgctggcctggatttgcataccgggctgttattattgcttgcactggcttttgtgctgttctacgaagccatcaatggtttccatgacacagccaacgccgtggcaaccgttatctatacccgcgcgatgcgttctcagctcgccgtggttatggcggcggtattcaactttttgggtgttttgctgggtggtctgagtgttgcctatgccattgtgcatatgctgccgacggatctgctgcttaatatgggaagctctcatggccttgccatggtgttctctatgttgctggcggcgattatctggaacctgggtacctggtactttggtttacctgcatccagctctcatacgctgattggcgcgatcatcgggattggtttaaccaatgcgttgatgaccgggacgagtgtggtggatgcactcaatatcccgaaagtattaagtattttcggttctctgatcgtttcccctattgtcggcctggtgtttgctggcggtctgattttcttgctgcgtcgctactggagcggcaccaagaaacgcgcccgtatccacctgaccccagcggagcgtgaaaagaaagacggcaagaaaaagccgccgttctggacgcgtattgcgctgatcctttccgctatcggcgtggcgtttagccacggcgcgaacgatggtcagaaaggcattggtctggttatgttggtattgattggcgtcgcgccagcaggcttcgtggtgaacatgaatgccactggctacgaaatcacccgtacccgtgatgccatcaacaacgtcgaagcttactttgagcagcatcctgcgctgctcaaacaggctaccggtgctgatcagttagtaccggctccggaagctggcgcaacgcaacctgcggagttccactgccatccgagcaataccattaacgcgctcaaccgcctgaaaggtatgttgaccaccgatgtggaaagctacgacaagctgagccttgatcaacgtagccagatgcgccgcattatgctgtgcgtttctgacactatcgacaaagtggtgaagatgcctggcgtgagtgctgacgatcagcgcctgttgaagaaactgaagtccgacatgcttagcaccatcgagtatgcaccggtgtggatcatcatggcggtcgcgctggcgttaggtatcggtacgatgattggctggcgccgtgtggcaacgactatcggtgagaaaatcggtaagaaaggcatgacctacgctcaggggatgtctgcccagatgacggcggcagtgtctatcggcctggcgagttataccgggatgccggtttccactactcacgtactctcctcttctgtcgcggggacgatggtggtagatggtggcggcttacagcgtaaaaccgtgaccagcattctgatggcctgggtgtttacccttccggctgcggtactgctttccggcgggctgtactggctctccttgcagttcctgtaatcgtacgcaccaaaacgagcgggtcagctggcccgcttcagattgtgacatagtgcgctttgttcatgccggatgcggcgtgaacgccttatccggcctacaaaaacatgcaaattcaatagattgcagagattatgtaggcctgataagcgtagcgcatcaggcaattttgcgtttgtaatcagtctcgagcgggtcagtttactggcccgctttttttatgcgttattattgctgaagtgcttaatgccaaatcatcaatgcaatcaggctgaccaccaccagaccacacaatgcgctggtcagaataaactgccgacgcacccgctcacagcggcgaataaattcatcatcgtgatgatcgcgataacgttgggcatagatataccaaacgagacgcacctgtttgttgggttggccatgattggtaaaaaagccccctccatcaacatattgatagagcaatggatcgcagttacgcagtaccactaacaacgcgcgtagactactgaaatagcgcgccatgttaacaatgcaaacgacacataaagcccaaaataatgcgacggtgcttatcatacctcctccccggcgacctgcccgcggagttccaccccggggctaccgctcccgatacgctgccaatcagttaacaccaggtcctggagaaaccgcttttgtggtgaccaacatacgagcggctctatagatagtgtaggagatcaggttgttttttttccagaaggttaaccactatcaatatattcatgtcgaaaatttgtttatctaacgagtaagcaaggcggattgacggatcatccgggtcgctgtaaggtaaggatggtcttaacactgaatctttacggctgggttagccccgcgcacgtagttcgcaggacgcgggtgacgtaacggcacaagaaacgctagctggccagtcatcgacaactttatggaaggagtaacactatggcttataaacacattctcatcgcggtcgacctctccccggaaagcaaagttctggtagagaaagcagtctctatggctcgcccctacaatgcgaaagtttctctgatccacgtagatgtaaactactctgacctatacaccgggcttattgatgtgaatctgggtgatatgcagaaacgcatctctgaagagacacatcatgcactgaccgagctttccactaatgcaggctacccaatcactgaaaccctgagcggcagcggcgacctgggccaggttctggtcgatgcaatcaagaaatacgatatggatttggtggtttgtggtcaccaccaggacttctggagcaaactgatgtcttccgcacgtcagctgatcaacaccgttcacgttgatatgctgattgttccgctgcgcgacgaagaagaataatcttccctctacgacgtgttcctgaacgcccgcatatgcgggcgttttgctttttggcgcgccttgttacctgatcagcgtaaacaccttatctggcctacggtctgcgtacgcaatcaaaatccccagccaatacaacatttaacaccatcatattttccatcattagtgtgatcatctggttattttctgttgtaatagtgtattaatctattcaccgcatcaatattaagaatctctgacagatgtaaactttttcgcgcgttatcccttacgcgttcatacttttcaggatggtattggaaggttaataaatatgaatacaacaacacccatggggatgctgcagcaacctcgcccatttttcatgatcttttttgtcgagttatgggagcgattcggctactacggcgtgcagggcgtactggcggttttcttcgttaaacagcttggattcagccaagagcaggcttttgtcacttttggtgcttttgctgcgctggtctatggcctcatttccattggcggctatgtcggcgaccacctgctggggaccaaacgcaccattgttcttggagcacttgtgctggcgattggctacttcatgaccggcatgagcctacttaagcctgacctgattttcatcgccctggggactatcgctgtcggtaacggcctgtttaaagctaacccagccagcttgcttagcaagtgctatccgccgaaagatccgcggcttgatggcgcattcaccctgttctatatgagcatcaacatcggcagcttgatagcgttaagcctggcccctgtgatcgctgatagattcggttatagtgtcacctacaacctgtgcggggcggggttaattatcgcattactggtttacatcgcctgtcgtggaatggtgaaagacattggttctgaacccgacttccggccaatgagcttcagcaaactgttgtacgtgttacttggcagcgtggtgatgatcttcgtatgcgcatggctgatgcacaacgtagaagtcgccaatctggtgctgattgttctctccatcgtcgtcaccatcatcttctttcgtcaggcattcaagctggataaaaccgggcgcaataaaatgtttgtcgcctttgtcctgatgctcgaagcggtggtgttttacattctctacgcccagatgccaacaagcctgaacttctttgccatcaacaacgtgcatcatgaaattctcggtttttccatcaacccggtcagcttccaggcgcttaacccgttctgggtggtactcgccagcccaatactggcaggcatttacacgcatctgggtaacaaaggcaaagacctcagcatgccgatgaaatttactctcggcatgtttatgtgcagtctgggctttttgacggcggcagctgcgggaatgtggtttgcggatgcacaagggctgacaagcccatggtttatcgtgctggtgtacttattccagagcttaggtgaactgtttattagcgcccttggcctggcgatgattgctgccctggtgccgcagcatttgatgggctttattctcgggatgtggttcctgacgcaggctgccgcgttcttgctgggcggctatgtggcaacatttaccgcggtgccggacaacattaccgatccgcttgagacgttgcccgtctataccaacgtgtttggtaagattggtctggtcacgctgggcgttgcagtagtgatgctgttgatggtgccgtggctgaaacgcatgattgcgacgccggaaagccattaattattcttgcagaaagcagggtagcgttatcgctaccctgttttagttttacactggcgtacctgcatagatatcaaagcgatgccctttagtgactaccgcgtttggcgtggcgacattcgccagcggtggcgcgtagtccgggcgctttaccaccacgcgtttggtcgccagcaagcgtgcaggctccagtaatccatcggcatcaagatccggtcccaccaggctctgaaagacacgcatctcttttttcactagcgcgcttttctgcttatgcgggaacatcgggtcgagataaaccacctgcgggcgcggggtaatatcagtcagcgccgtcaggctggaggcgtgaattaactgcaaccgctcctgcaaccagccgccgatttccgcatccgcataaccacgcgccaggccgtcgtcgagtagcgcggcaaccactggattacgctccagcatccgcacgcggcagccgacactagccagtacaaaggcatcgcgcccaagtcctgcagtggcatccaccacatccggcaaataatcgcctttaatgcccaccgctttcgccaccgcctcaccgcgaccaccgccgaatttgcgtcggtgcgccatcgctccgccaacaaaatcaacaaagatgccgccaagttttggctcatcacgcttgcgcaattccagatgttccggcgttaacaccagcgccatcaggttgtcttcatcgtgctccagcccccagcgggccgccagaacagataaggcaccgtctccggtgcctgtttcatcaattaagcagattttcactgaatgatcagcccttaatgccgtaatgctccagcatcgcatccagctgcggttcacgaccacggaagcgtttgaacagatccatcggctcttcactaccgccacggctcagaatgttgtcgaggaagctctgcccggtttcacggttgaaaatgccctcttcctcaaagcggctgaaagcatctgccgccagtacgtcagcccacaggtagctgtagtaacctgcggcataaccaccggcgaaaatatggctgaaagcgtgcgggaaacggccccaggacggggatggcaccacggcaaccagtttcttgatttctgccagagtttcgaggatttttgccccctgatccgggcggaactcggcatgaaggcggaaatcaaacaggccgaactccagctgacgcagaataaacagcgccgcctggtagttcttcgccgccagcattttatccagcaactctttcggcagcggttcgccggtttcatagtgaccagagataaacgccagcgcctccggctcccagcaccagttttccataaactgactcggcagttcgaccgcatcccacggcacaccgctgataccggaaacaccagcggtttcgatgcgggtcagcatatggtgcaggccgtgaccgaactcgtggaagagggtgatcacttcgtcgtgagtgaacagcgccggtttaccatttaccgggcggttgaagttacaagtcaaatacgcgaccggtttttgcaaagaaccatcagctttacgcatctggcctacgcagtcatccatccacgccccgccgcgcttgttttcacgggcatacagatcgaggtagaagctaccgcgcagttcgttattttcgtcatacagttcgaagaaacgtacatccggatgccagacatcaacatctttacgctctttagcggtgatgccgtaaatacgcttaaccacttcaaacaggccgttaaccgctttgttttccgggaagtacggacgcagctgttcgtcactgatgctgtagaggtgctgtttttgtttttcgctgtagtaagcgatatcccacggctgcaactcatcgacgccaaattcggctttggcaaaggcacgcaattgcgccagctctttttcgccttgtggacgcgcgcgttttgccagatcggttaagaaatccagcacctgctgcgggttttctgccattttagtggcaagggatttaaaggcgtagttttcaaagcccagcagttgcgccagttcgtgacgcagcgcgaggatctcttccatcaccttgctgttatcccatttaccggcgtttgggccttgatcggaggcgcgggtgctgtaagcgcgatacatctcttcacgcagagcctggttgtcgcagtaggtcattaccggcaagtagcttgggatatccagcgtcagcaaataaccttccagctctttcgcttcggcctgggcttttgccgcagccagcgcgctttctggcatccccgccagctccgcttcgtcggtaacgagtttggtccagcccattgtcgcatcgaggacgttgttgctgtactggttgcccagttcagaaagacgggtcgcaatttcgccgtaacgctgctgtttctctttcggcagacctatgccagagagttcaaagtcgcgcagtgcgttatcaaccgctttcttctgcgccgtgttcagcgtggcgtaatgatcgccatcgcgcaggtcgcgatacgctttatacagcccttcatgttgccctacccaggtgctgtattcgctcagcagcggcagggtttgttcgtaggcttcacgcagttccgggctatttttcacgctgttcaggtggctgaccggggagaagatacgccccaacacatcgtccacttccgccagcggctggcagagattttcccaggtgtacggtgccccttgcgctactacgcgctccacgttttcgcggcagtcgttcaatgccttagtcacggctggaacgacatgttccgggagaattttagaaaacggaggcaattcaaagggagtcagtaacggattcgtcattcgcgcagtcctggttaaagaggttaaggaagcgctcaacaggcgctttacataatgtgtgtagcatggggttaagtgtagtgaatttcaatgagaaacgttacgctttcgcggcggcggcctcttttcggtatactgtcctgatacgcttttgtgcgccccgaatacgggccgatttttacttaccggaacacctttacccatgctcagttatcgccacagctttcacgctggcaaccacgccgacgtccttaaacataccgttcagagcctgatcatcgagagcctgaaagagaaagataaaccgtttctctatctcgacacccacgcaggggccgggcgttatcagttaggcagcgaacatgccgagcgtaccggcgaatatctcgaaggcatcgcccgtatctggcagcaggacgatttgcccgcagaactggaggcgtacatcaatgtggtaaaacacttcaaccgtagcggtcagttgcgttactaccccggtagcccgttgattgctcgcctgctactgcgtgaacaggacagcctgcaactgaccgaactgcacccgagcgattacccgttgttgcgttctgaatttcagaaagatagccgtgcgcgtgtcgaaaaagccgacggtttccagcagcttaaggccaaactgccgccggtttcccgccgtggtttaatccttatcgacccgccgtatgaaatgaaaactgactatcaagcggtggtcagcgggatagcagaaggttacaaacgtttcgccactggtatttacgcactgtggtatccggtggtgctgcgtcagcaaattaagcgcatgatccacgatctggaagcgaccggtattcgcaaaattctgcaaattgaactggcggtactgccagacagcgatcgccgtggcatgaccgcttccggcatgattgtgattaacccgccgtggaaactggaacaacagatgaataacgtgctgccgtggctgcacagcaaactggttccggcaggcaccgggcacgccaccgtaagctggatcgtgccggagtaattgcagccattgctggcacctattacgtctcgcgctacaatcgcggtaatcaacgataaggacactttgtcatgactaaacactatgattacatcgccatcggcggcggcagcggcggtatcgcctccatcaaccgcgcggctatgtacggccagaaatgtgcgctgattgaagccaaagagctgggcggcacctgcgtaaatgttggctgtgtgccgaaaaaagtgatgtggcacgcggcgcaaatccgtgaagcgatccatatgtacggcccggattatggttttgataccactatcaataaattcaactgggaaacgttgatcgccagccgtaccgcctatatcgaccgtattcatacttcctatgaaaacgtgctcggtaaaaataacgttgatgtaatcaaaggctttgcccgcttcgttgatgccaaaacgctggaggtaaacggcgaaaccatcacggccgatcatattctgatcgccacaggcggtcgtccgagccacccggatattccgggcgtggaatacggtattgattctgatggcttcttcgcccttcctgctttgccagagcgcgtggcggttgttggcgcgggttacatcgccgttgagctggcgggcgtgattaacggcctcggcgcgaaaacgcatctgtttgtgcgtaaacatgcgccgctgcgcagcttcgacccgatgatttccgaaacgctggtcgaagtgatgaacgccgaaggcccgcagctgcacaccaacgccatcccgaaagcggtagtgaaaaataccgatggtagcctgacgctggagctggaagatggtcgcagtgaaacggtggattgcctgatttgggcgattggtcgcgagcctgccaatgacaacatcaacctggaagccgctggcgttaaaactaacgaaaaaggctatatcgtcgtcgataaatatcaaaacaccaatattgaaggtatttacgcggtgggcgataacacgggtgcagtggagctgacaccggtggcagttgcagcgggtcgccgtctctctgaacgcctgtttaataacaagccggatgagcatctggattacagcaacattccgaccgtggtcttcagccatccgccgattggtactgttggtttaacggaaccgcaggcgcgcgagcagtatggcgacgatcaggtgaaagtgtataaatcctctttcaccgcgatgtataccgccgtcaccactcaccgccagccgtgccgcatgaagctggtgtgcgttggaagcgaagagaagattgtcggtattcacggcattggctttggtatggacgaaatgttgcagggcttcgcggtggcgctgaagatgggggcaaccaaaaaagacttcgacaataccgtcgccattcacccaacggcggcagaagagttcgtgacaatgcgttaaatgttaaagggctaagagtagtgtgctcttagcccttaattacgtttccgctatcagttcagaagctgaagcagaaagcggatcagttccagcagcgcaattaacgcccctagaacgatgattgctttatcaatcacccgttttctccatgcgatggagtgagaatgcatccgcttactcatccactgcctgtcacggcgcatgtctcattgttagataagaactctctcactccggccagagcatcagttaacggcaccacccgtacttctgaccaggactttgaaagcgtttatgcgcattgccagagtgaaaatgcctcagagctaactggataatcatacagtacatgcaggttataaaaccagcacgtccttgcaatagtttcagtatggtattagcattgatgcgttagatgatggctatctcactccagtcagagccaccaactcagggctggaaagtaaaaaaccgacgcaaagtcggtttttttacatccggattcggacaaggcttaatatgacgatgacccagtgaaagtatataaatcgtcactgcgatatataccgaagtgctccctccgccagctgaagaaatcgctaattcttgcaatgttagccactggctaatagtattgagctgttagataagaactctctcactccagccagagccaccaactcagggctggaaagtaaaaaaccgacgcaaagtcggtttttttacgtcctgattcagacctcctttcaaatgaatagccaactcaaaattcacacctattaccttcctctgcacttacacattcgttaagtcatatatgtttttgacttatccgcttcgaagagagacactacctgcaacaatcaggagcgcaatatgagttttctgttacccatccaattgttcaaaattcttgctgatgaaacccgtctgggcatcgttttactgctcagcgaactgggagagttatgcgtctgcgatctctgcactgctctcgaccagagccagcccaagatctcccgccacctggcattgctgcgtgaaagcgggctattgctggaccgcaagcaaggtaagtgggttcattaccgcttaagtccgcatattccagcatgggcggcgaaaattattgatgaggcctggcgatgtgaacaggaaaaggttcaggcgattgtccgcaacctggctcgacaaaactgttccggggacagtaagaacatttgcagttaaaaatttagctaaacacatatgaattttcagatgtgttttatccgggaggcattatgttactggcaggcgctatctttgtcctgaccatcgtattggttatctggcagccgaaaggtttaggcatcggctggagtgcaacgctcggcgcagtactggcgttagttacgggcgtggtccatccgggtgatattccggtggtgtggaatatcgtctggaacgcgacggctgcgtttatcgccgtcattatcatcagcctgctgctggatgagtccggcttttttgaatgggcggcgctgcacgtcagtcgctggggtaatggtcgtggtcgcttgctgtttacctggattgtcctgctcggtgctgccgttgccgccctgtttgccaatgatggcgcggcgcttattttgacaccgattgtcatcgccatgctgctggctttagggttcagtaaaggcactacgctggcgttcgtgatggcggccggattcattgccgataccgccagcctgccgcttattgtctccaacctggtgaatatcgtttccgctgatttctttggcctcggctttcgcgaatacgccagcgtgatggtgccggtggatatcgccgcgattgttgccacgctggtgatgttacatctctattttcgcaaagatattccgcagaactacgatatggcgctgctgaaatctcccgcagaagcgatcaaagatcctgctacgttcaaaactggctgggttgttttactgcttctgctggtgggatttttcgtcctggaaccgctcggcattccggtgagcgccattgcagctgtgggcgcgctgatattatttgtcgtcgctaaacgcggtcatgcgattaatacgggtaaagtcctgcgcggtgccccctggcagattgtcatcttcagcctcggcatgtatctggtggtttatggcctgcgcaatgccggattaacggaatatctttctggcgtactcaacgtgctggcggataacggcctgtgggccgcgacgctcggcaccggattcctcaccgccttcctctcttctattatgaacaatatgccgacggtactggttggcgcgttgtccattgatggcagcacggcatctggcgttatcaaagaagcgatggtttatgccaatgtgattggctgcgatttgggaccgaaaattaccccaattggtagcctggctacgctactctggctgcacgtacttagccagaagaatatgactatcagctggggatattacttccgtacagggattatcatgaccctgcctgtgctgtttgtgacgctggctgcgctggcgctacgtctctctttcactttgtaatgagatactgatatgagcaacattaccatttatcacaacccggcctgcggcacgagccgtaatacgctggagatgatccgcaacagcggcacagaaccgactattatccattatctggaaactccgccaacgcgcgatgaactggtcaaactcattgccgatatggggatttccgtacgcgcgctgctgcgtaaaaacgtcgaaccgtatgaggagctgggccttgcggaagataaatttactgacgatcggttaatcgactttatgcttcagcacccgattctgattaatcgcccgattgtggtgacgccgctgggaactcgcctgtgccgccctagtgaagtggtgctggaaattctgccagatgcgcaaaaaggcgcattctccaaggaagatggcgagaaagtggttgatgaagcgggtaagcgcctgaaataaagcggcgatatcccccccacaggttgttagaaaagtgcgctttatttatgtcggatgcgacgctggcgcgtcttatccgacctacaaagttatgaaaattcgatgaatagtatgttatttgtaggcctgacaggcgtagcgcatcaggcgattttgctatttacacagtactccctgcgtgagattccaattatcgcgtccagcatggtgtatcagtgagctgcttagttatcagcgatacagcgcagtagtttaaagacgtactggattatgatttatcagtggtttacacaacaaattattaaataattataagataccttaacccattttattattacacatctaaaacatcacaaaaaaaaatcacttcacacactatcagagaacataataactttttaaaatgagcgcattttgatagttgttaacgatttcctttacgatactatcactaccctttttttacacacaaatattaccgggtggagataaaagggaaatcaaaggtaattatatcaggaagatataacgcattacatttattgtgtgtagaagaaaatccattcctgttctaattatccaatttaaacatcttagcataaaacaaatgatgaataaggaattttatattgattattagcactttataatcattgaataaaaatagattttatgtacttttaaaacaatgcactatattatggggtgatggatattcatgtcacgccccaaaattaactgagttcacctaaacagaaaggatataaacatcagacaggtttacgttactatcaggcatatcacctcagaatcagatgaaaactataaagaaatatctattatggttttaatatttgttgataaggatagtaacatgaacatgacaaaaggtgcactcatcctcagccttagttttttgcttgccgcatgtagtagtattccgcaaaatatcaaaggcaataaccaacctgatattcaaaaaagttttgttgctgttcataaccagccggggttatatgttggtcaacaagcgcgctttggtgggaaggttatcaacgttatcaatggcaaaacggatacgttgttagaaatctctgtattaccgttggatagctatgcgaagcctgatattgaagccaactatcagggccgactgctcgccagacaaagcggcttccttgatccagtgaactatcgtaatcactttgttaccatcctcggcaccattcagggtgaacaacctggctttatcaataaagtcccgtataacttcctggaagtgaatatgcagggcatccaggtgtggcatttgagagaagtggttaataccacctataacctgtgggattacggctatggtgcattctggccggaaccgggctggggtgcgccttactacaccaatgcggtgagtcaggtaacacctgagctggtcaaataacaccaccgaaagatgcagatgctttctcagcatctgcatcatgcattacatcaaattaatacacagtaagctaactattattattataagccctgtcctgttaattacctttggcaaactgattataaagttaatgtccgcaccaggagtcggttatgtttcttataattaccagggatacgatgttcttcaccgcgatgaaaaacattctgagtaaaggtaatgtcgttcatatacagaacgaagaagagatcgacgtaatgttgcatcagaatgccttcgtcattattgatacattaatgaataatgtatttcattctaattttctcactcaaattgaacgattaaaacctgtccatgtcattattttctccccctttaatattaaacgctgcctggggaaagtgccggtgacctttgttccgcggactatcactatcattgattttgtcgcactcatcaatggcagttactgctctgtgcctgaagcggctgtgagtcttagccgcaagcaacatcaggttctgagctgcattgcgaatcaaatgacaacggaagatattctggagaaactgaaaataagcctaaaaacgttctactgccataaacacaatatcatgatgatcctcaatcttaagcggatcaatgagctggtacgccatcagcatattgattatctggtgtgaatttcaggcttacggtgagtctggctacgctgccacacagattagctaatactaacgcctttcacccctgccataccttttaataatcgcaacaggtcttctatgctcgttgtggcatgaagctggatatcaatggcgaccacttcatgatcttcattttcctgcaagctaactaaatcagtttttattttttgctgcttaaaccagtcgagcatacttaccgtattaccgttcactaatgtcagctgtaaatggtaatttttgttcatcaggcggaaggttaattgatggaagacttccagcaccaacaaggtcatcacactaccataaatacccagttcgtacataccgctgccaataaccatacctatggcggcggtcacccagatatccgctgccgtcgtcagacctacaatattttggttacgaacgagaatgttacctgcaccgataaacccgacgcccgtcaccacctgagcagcaatacggctggggtcgagtccgacgtgatctaaagacagcacgtcagcaaaaccatatttgctaacaatcataaacagggcgcttcccatgccaattaatacatgtgtgcgtaaccctgctcctttgccgcgcatttgcctttccatgccaatagcgccacaggcaattgccgcgagtataagacgtataataaattctgctgtcatataaaaatgcaaaaaggagcagcaagatggctcaacttgctactcttttttacttgcacctcattaattcggcaagtcattagatgcttgatttttgaaggtatacaaatttttctgcgggtttttcttacagtattcgatcactttaggaatttgagtgagatcggtttcatttaaagtaacggtatcgccacctttatatactgtttcttcatgcagcatccaccatgcaaccggggtcattgcttttggattcagatcaataaattcctggcaggtcatatctttagcggattcattggctgccaacgcagattgtgcgttcaccagactcaaagccgctacagcgcccataaaaataaacgctttacggagagaactaatattcattttgtaacccattcaatatagagattatatatgaacaggaggaatagctgcttttaaagaagatattccggcctgttcaatatgcaaggaagtacgatgtaacgcattcccggaattacatatctttcttaattttgtcccattcgcctttaactttatctttaaagttggcttgtttatcctgagtacaagcctgaacgatagctggggttacggttgcaataccctgaacatctaaaaccgcatcttctggtttatctttgttgttcagcgcttcagcaaaaccaactgcagttggctggaaggattcgtccacagccaggaaatcttcacaggtccaggagttgaccggttttttgttatcagctgctttttgcgcatccgctgcattgctcacaactggcagaagaagcagaccaccaagaataacgcctaatacttttttcatcgtaatatcctcaactataaagtgaaagagccgtcacgaatcaatttcgacactgaggttataacctggttttctgtatatgtcatgttgatggaaaatatcaaaatcagatatttttatttcaatacaatgagttacagatgcatcagatactgcaattaggaaatttttattaaatcgactgcattcttagacgcgtttttggcatagattgatagcaggggattttcttcttaattttatagggtggttctatgttatatatagataaggcaacaattttgaagtttgatctggagatgcttaaaaaacatcgcagagcaatccagtttattgccgtgctgctgtttatcgtcgggttgctgtgtatcagtttcccgttcgtctctggcgatattttaagcacagtagtgggtgcattattaatctgcagcggtattgcgcttattgtcgggttattcagcaaccgcagtcataatttctggccggtattatccggtttcctcgtcgcagtcgcctatttattgatcggctatttcttcatccgcgcaccggagctgggcatttttgccattgcggcatttattgccggtttgttctgtgttgcaggggttattcgcctgatgagttggtatcgtcagcgtagtatgaaaggcagctggctacagctcgttattggtgtgctggatatcgtcattgcctggatattccttggtgcaacgccgatggtgtctgtaacgctggtttccacactggtgggaattgaactgatatttagcgccgccagcctgttcagcttcgccagtttgttcgttaagcagcaataattaccccggttgtcacccggatcatagtcacttgatgtgactatgatccgattaatactctctccgctacgcagtgttgtagatcaattgcgcactatcattgaaataattacctgctagtgattatttcaacctactgaatttcatctaatttttttcactctatggcaaattagccatttcaaacattatcatggctgatattttccgtagtcaggtttaatgttttaaaagtgctgtgggaaagtgaacaaagagttccgtaagcgttgatgctatgggcggttaaataagtaatccgggttcatttttttgcaactggcgttgattacattgcataaatatccgtgtctccagacgctatataaaaacctgaagacatgaatgcgttatttactcaggtaatttcaatgcgttaaaagaaagctggcaatccaattgccagcttaagtcgaaacaaggagactcgatatttaaatcggattacattttaactttagtaatattcttcagagatcacaaactggttattgataacttattcttgggcagtaatccgcaaacgttaactttttgtttgctatttacaagctgataacaaccaggaatcttacttaggatcaatatatggagtgcgtgatggataaatctgaagtattgattagtgttaatagacgtattagttcacgaagggtaaagttcttataggcgtttactatattgaacaacgattcggacaaggatgtaaataatgaaaaggatgacatattcgaaacgataacggctaaggagcaagttatgatttttctcatgacgaaagattcttttcttttacagggcttttggcagttgaaagataatcacgaaatgataaaaatcaattccctgagtgagatcaaaaaagtaggcaataaacccttcaaggttatcattgatacctatcacaatcatatccttgatgaagaagcgattaaatttctggagaaattagatgccgagagaattattgttttggcaccttatcacatcagtaaactaaaagctaaagcgcctatttattttgttagccgcaaagaaagtatcaaaaatcttcttgagattacttatggtaaacacttgccccataagaatagtcaattatgttttagtcataatcagttcaaaattatgcaactgattctgaaaaataaaaatgaaagcaatatcacgagcacgctcaatattagccaacaaacattaaagattcagaaattcaacattatgtacaagctgaaactaagacgtatgagcgacatcgtcaccctgggtatcacatcttatttttaatcaggacataagcaactgaaattgatggctggcatgacgagggatgcagatgctgatttcattacccccggtgattactaaaggagaggctaaaacgactttattcccctggtatgtgtatccaccagtagaacccttcgttgcccgaatgctggcaggaactgttggcagaacggcaacattttttttgtcgttgacctcaccatgtcgatcactgtgcctgtatcccaccttactggctgacaaccccactatgccgctggtctgtaaatccctcatatctctcctcgcgcgcaatttaaagaaccgttatttctcaagaattttcagggactaaaatgaacagaagaagaaagctgttaataccgttgttattctgcggcgcgatgctcaccgcctgcgatgacaaaagcgcggaaaacgccgccgccatgacgcctgaggtcggtgtcgtcacactctcccccggtagcgtcaatgtgttgagcgaattgcccggtagaaccgttccttatgaagttgccgagatacgtccccaggtgggcggtattatcattaaacgcaactttatcgaaggcgataaagtgaaccagggcgatagcctgtatcagattgatcctgcacctttacaggccgagctaaactccgccaaaggcagcctggcgaaagcgctctctaccgccagcaatgcccgcatcacctttaaccgccaggcaagcttgctgaagaccaactacgttagccgtcaggattacgacaccgcgcgcacccagttgaatgaagcagaagccaatgtcaccgtcgccaaagcggctgttgaacaggcgacgatcaatctgcaatacgcgaatgtcaccagcccgattacgggcgtcagcgggaaaagcagcgtgaccgtcggcgcactcgttaccgctaatcaggcagatagcctggttaccgtacaacgtctggacccgatttatgtcgatctcacgcagagcgtgcaagatttcttacgcatgaaagaagaggtcgccagtgggcaaatcaaacaggttcagggcagtacgccagtacagctcaatctggaaaatggtaaacgctacagccagaccggcacgctgaaattctccgacccgacagtggatgaaaccacgggctccgtgacgttacgggcgattttccccaacccaaatggtgacttgctgcctggcatgtacgtcacggcattagtggatgaaggtagccgccagaatgtattactggtgccgcaggaaggcgtcacccacaacgcccagggtaaagcaacggcgctcattctggataaagacgatgtcgtgcagctacgcgaaattgaagccagcaaagccatcggcgaccagtgggtcgtcacctctggcttgcaggctggcgatcgggtgatcgtttccggtttgcaacgcattcgtccgggtatcaaagcacgagcaatttcctccagccaggaaaacgccagcaccgaaagcaaacaataacgttgcaggcttaaggggactttcatggctaactattttattgatcgcccggtttttgcctgggtacttgccattattatgatgcttgcaggtggtctggcgatcatgaacttaccggttgcgcagtatccgcagattgcgccaccgaccattaccgtcagcgctacctatccaggtgccgatgcgcaaacggtagaagacagcgtcactcaggtgattgagcaaaatatgaatgggcttgatggcctgatgtacatgtctagtaccagtgatgcggcgggcaatgcctctatcactctgaccttcgagactgggacatctcctgatatcgcacaggttcaagtgcaaaataaactgcaactcgctatgcctagtttacctgaagcagtgcagcagcaggggattagcgtcgataagagcagcagtaatatcctgatggtagcggcgtttatttctgataacggcagcctcaaccagtacgatatcgcggactatgtagcgtctaatatcaaagacccgctaagccgtaccgcgggcgttggtagcgtacaactctttggttccgagtatgccatgcgtatctggctggacccgcaaaaactcaataaatataacctggtaccttccgatgttatttcccagattaaggtgcaaaacaaccagatttccggtggtcaactgggtggcatgccacaggcggcagaccagcagctaaacgccagcatcattgtgcagacgcgtctgcaaacgccggaagaatttggcaaaatcctgttgaaagttcagcaagatggtagccaagtgctgctgcgtgatgtcgctcgcgtcgaacttggggcggaagattattccaccgtggcacgctataacggcaaacctgctgccgggatcgccatcaaactggctgccggagcaaacgccctggataccagccgggcagtcaaagaggaactgaaccgcttaagtgcctatttcccggcaagtctgaagacggtttatccttacgacaccacgccgtttatcgaaatttctattcaggaagttttcaaaacactggttgaggctatcatcctagtcttcctggtcatgtatctgtttttgcagaatttccgtgccacaatcatcccgacgattgccgtaccggtggttattctcgggacgtttgcgatcttgagcgcggtcggtttcaccatcaacacgttgactatgttcgggatggtgctggcgatagggttactggtggatgacgccatcgtggtggtggagaacgtcgagcgtgtcattgcggaagataagctaccgccgaaggaagcgacgcataaaagcatggggcagatccaacgtgcgctggtcggtattgccgttgttctttccgcagtgtttatgccgatggcctttatgagcggtgcaaccggggagatctaccgccagttctccatcacgctgatctcctccatgctgcttagtgtatttgtggcaatgagcctgacccctgccctgtgcgccaccattctgaaagccgcgccggaaggcggtcacaaacctaacgccctgttcgcacgcttcaacacgctgtttgaaaaaagtactcaacactataccgatagcacccgcagcctgttgcgttgtaccggtcgctacatggtggtctacctgctgatttgcgccgggatggcggtgctgttcctgcgcacgccgacctctttcttaccagaagaggatcagggggtatttatgaccaccgcgcagttaccttccggtgccaccatggttaacaccacgaaagtgctgcaacaggtgacggattattatctgactaaagagaaagataatgtccagagcgtgtttaccgttggcggctttggcttcagcggtcaggggcaaaacaacggcctggcgtttatcagtctcaagccgtggtctgaacgtgtcggtgaggaaaacagcgttaccgcgatcattcagcgggcaatgattgcgttaagcagtatcaataaagccgtcgtcttcccgttcaacttacccgcggtggctgaactgggtaccgcgagtggttttgatatggaactgctggacaacggtaacctggggcacgaaaaactaacccaggcgcgaaacgagctgttaagtctggcagcgcaaagtccgaatcaggtcaccggggtacgcccgaacggcctggaagatacgccgatgttcaaagtgaacgtcaacgctgcgaaagctgaagcgatgggcgtggcgctgtctgatatcaaccagacaatttccaccgccttcggcagcagctacgtgaacgacttcctcaaccaggggcgggtgaaaaaagtgtatgtccaggcaggcacgccgttccgtatgttgccggataacatcaaccaatggtatgtacgcaacgcctctggcacgatggcaccgctttctgcctacagctctaccgaatggacctatggtagtccgcgactggaacgctacaacggcatcccgagtatggagattttaggtgaagcggcggccgggaaaagtaccggtgacgccatgaaatttatggcagacctggtcgctaaacttccggcaggcgtcggctacagttggaccggactaagctatcaggaagcgttatccagtaatcaggctcctgcgctgtatgcgattagtctggtcgtggtgttcctcgccctcgccgcactctatgagagctggagtattccgttcagcgtgatgttggttgttccgttaggcgtcgttggcgcattactggccaccgatctgcgcggcttaagtaatgacgtctacttccaggttggtttgctgaccaccatcgggctttccgccaaaaacgccatcctgattgtcgaatttgccgttgagatgatgcagaaagaagggaaaacgccgatagaggcaatcatcgaagcggcgcggatgcgtttacgcccaatcctgatgacctctctggcctttattctcggcgtgctgccgctggttatcagtcatggtgccggttctggcgcgcaaaacgcggtaggtaccggcgtgatgggcgggatgtttgccgcaacagtgctggcaatttacttcgttccggtctttttcgttgtagtggaacatctctttgcccgctttaaaaaagcgtaacgtgtaaatgagagtaaggttgaacatgaaggttcagccttactctttcctgctaaccattcaccactcaacaaccagctaaccgtcaggaataccaggcttagtacacagcactgaaagtagaaaccactccagccattcgtcatcaatttgaacaacacaatactgacccacattcccgtaatcgtatgaattgtcagcttaataatcccaaacatgccgagtcttttcctcctgaaaataccgataccgcctggcaaactgcgaaagagaactagccggtagcccggcagaaatcatcagggaagagtttcacatgaagcaggtgtgagatcctgaccaatattcaaatgcgaaatatgtcaggaaaaggtacctgggctatgttgcgcaaactgatgtggcgttacaccataatattgtcgaaatgtgtttataaagtagcttgtactgctatagccacatttttccgcaatagtatgcagaggaatttgacgtaactcgagtaatcgtctggccatgctcatcctggaggcgagtaatattttactgaaacaggtattttcatcctgcaacttttttttgattagactctcgctggtatacattctttccgcgatatcgcgcagataccaacgtttggcgatatcaaagctaataaggcgttcaacttttccactaacagtgctgatgctattgaaaagtaaggggatcagttctttcttatgagaaaacatgcttaaacaggaaaggtagagcatattgctcagtatcggactatttaccccggattcattgaagctatcaaaaatcgccgtcaccagcggcatggggggactctggttaattaacaaacggtctttgctgtgtaaccctaaattgcgtggtagctgacgaatattttgtaagtaatggcaaactgtcagctcatcgatatccagtcgtcgcgtatccggactacaaaacgcaaaatcgtctgccaaatttttctccagcagcagaatactctcgttatgcaggcttattttttgctgttcatgataaatatcgaaactacgacgaatgaggatcacgctgcagacatgagtcatgattatcccttatatttcatactgcgattatttcaatttcagtatactaatgaaatgatgccagactgtttcttagcgcaaaaactgccagatttggtaggaccaaaatttatccacaaagtagttttgcataacagttaattgataataagtaaatgcagcacgaatatattttcgcacagcgtatagcttatgtttataaaaaaatggctgatcttatttccagtaaaagttatatttaacttactgagagcacaaagtttcccgtgccaacagggagtgttataacggtttattagtctggagacggcagactatcctcttcccggtcccctatgccgggttttttttatgtctgagtaaaactttataatcttattccttccgcagaacggtcagtgccgtaaaaattcccttgcgcaacaatacttgccgcgctgtcacggttgctcaatctctgcgcgcttcgctcctgatactctgtgggcgtcatcccataataatttcgaaagacgtaaatgaaatagctcacgctgtgatatccacaggatactgcaactcgcttaatactaaaaccatgtataacaataagttgcaaagcacgttgcattctacactcagtaagcaactgactataacttgtctcttcttcgcgcaattttttctttaacagacttggactcatcaacagctcgctggcgattcgggctagtgtccactcatgggcgatattattattgataaccgtacaaactcgtgttcgcatgttcggttgtaaaacgttcagaagcagcggtataaagtgctcatcctcaagaaaaacagataacaacgcaaagattaatgctcttttacgtagcatttctgcatagcgaagattcttattctggcttagttgcgcaacttcctgaaaaacaggaatatctctactacagtgatgaacgagtaaactagaaacttttttatgtgcatgaagatttaatgcctcctccttgagcatcgggagaaataaactaagcgtgtccctactcacgaatacaaaattttcaacacacttatctactcgaatttggcttgcatccgcaaaaaccaggtcaccgccattaaaatagcgatattcaccattaaccatggtgagaatatatttatgtcttgcatacgcaattagacaattcccatgtagactttgcatagttgacttaatattacataaacatattactgtttattaatgtagcacgccgccctcttaagtcaaattgattgataaataaatttaaacgaagcgggagaacaggatgataatgtgtgatgttctacgggcaggatgactggatttataatacaaaaacgtgtttaagaacacagggaaattaatagtaagcaaataatcccttttcgtgacattaaaggtaatcgctacatttaataaacattcatataacatatatcttatcaacacgatgaatagacagccaatatattattgcgattaataagcaaccgaatgcccagctgtttttttaaaggctgggcattcggtttttacaacgttatgttatcaggtgtgtttaaagctgttctgctgggcaataccctgcagtttcgggtgatcgctgagatatttcagggaggctttgtagtcttccagcaacagttcagcaaagtccatttcgaagccgcgacgacacataatgcgcatcaccacgatgtcggtggcttcaccgccgagagtgaaggccggaacctgccagccgcgcagacgcagacgttcagagaggtcgtacagggtgtatcccggatcttcaccatctttcagtttgaagcaaaccgccgggatgccttcgtccgggcgacccgtacagatgaactcatacggccccagtttggcgatttcatccgccagataagcggcaacctggtaagaggcgttctgtactttggtatagccttcacgaccgaggcgcaggaattcatagtactgtgcaattacctgacccgccgggcgggagaagttgatggcaaaagtaccaatttgaccacccaggtagtcaacgttgaacaccagttcctgcggcagcgcttcttcgtcacgccagataacccagccgcagcccagcggagccagaccgaatttatggccactagcactgatgcttttcacacgcggcaggcggaagtcccagacgatatccggggcgacgaacggtgccaggaagccaccgctggcagcgtcgatgtgcatgtcgatgtcgataccggtgtcggcctggaatttatccagcgcatcgtgcagcggttgtgggaactcatagttaccggtgtaggtcacgccgaaagtcggcaccacgccgatggtgttttcgtcacaggcttcaatcatgcgtttcgggtccataaacaactgaccggggcgcatagggatctcacgcagctccacatcccagtagcgggcgaatttatgccagcagatttgtaccggaccgcacaccaggtttggtttatccgttggtttgcctgcagcttccatacgcttgcgccaacgccatttcatcgccatcccgccgagcatacaggcctcggaagaaccaatggtgttggtgccaacggcctgaccatttttcggcgcaggcgcatgccacagatcggcaaccatatttacgcaacgcaggtcgatggctgcggattgcggatattcttctttgtcgatccagtttttattgatgctcaaatccatcaatttatggacgttttcgtcgtcccaggtctggcagaaagtggccaggttctgacgagcgttgccatcaagatataattcatcattgataatctgaaatgcgacatcatcgcgcatttcgtgcagcggaaatcgtttactctccgcgatagtagaaatggcctttgcgccaaaacgactatcgagtagttcactgcggaaatccgttaacagcttctggtccatttcgaactccttaaatttatttgaaggcaataaaaaagtaggatttatccgcaatggaagcaaggcattacaggcttaatttaaataacaaaatcctaagcagaaaaacgactttttataatataaacatttaacatgataatattaaaaacagactttattatcgtaataaaaatcgcccaaacattgctgttcgggcgatcaaattaattattgtttatcctgcatatacggcgtgtacaccccgttcagactgtgcaggaaagctacgatatcatccacatcctcctgcggcagctctttgcctacctgatagcgcagcatcagtttcaccgccccgtccagcgtcggcacgtcaccgcgatggaagtacggtgccgttaaagcaacgttacgtaaaccgggtactttctgacgcaatttatcacgctcttctttagtcacattcatacgaccaatatccgccgccgtaatttccccaaagttaaagtcttttttcagccccaacggttcaaaggaacgtccgccgagaataataccaccatgacaagttgcacatttattatctttaaataattgatagccttttttctgttgcgccgtcagcgcattttcatctccgcgcaaccatttatcaaatggggaatccggcgtaattaatgttttctcaaattcagcaatggcatcagtaatattttcgccactgaaaccttgcggatagacttcgaggaactgcgttttaagctgcggatctttttccagcttagcaataatttcgtcccaggatttgctcgccatttcaatcgggttcaacggcggtccaccagcctgatcctgcaatgttgccgcacgaccatcccagaactgctcaacgttaaatacactgttaaataccgtcggcgcgttaatcggcccaactgcgccaccaacaccaatgcttgtttttctgccatcgacgccccccgcattcaacgcatggcaatgagcgcaactaatggtgctatcagcgcttaaacggggatcgtgatacagcgcaaaacccaacgccactttttgcgcatcggtaggcagtttttgcgggatgggctgcaccggttcattgcgatgttccggagcagtatcattgctggcgtaatattccgcgcgctgttttgcaatccaggccagtatttccgcccgctcttcatcactcaccttacccgcccagtgtagcgcggtataacgcgttggtggcatagtttcatactgcatcacccattcaatcttattcaaatcgctttggctaacgggtttatcagccagcagtgccgcacgcacggcctcaaggttaaaagatttatatccaagcttaatgtcgtaatccatcaactgtttcgcgccaggaatataataataggcgggtaattctgcgctaggcgtgtggcaatagtcgcatcctttttcgcggagaaagcctaaaaccttattattttcactgacagcagatgcctgaacatcggcctgtttactgcgtttattatcgtggtaccacacataaccagataaccctaaatagcaaatcgcgacgccagccaggccgatcgcggtaatacgactgaccattttcattattcttccctcacggtggtgagttattgtgacccagaaaattttccagaatgctgcaaacgtctctgcgagacaaagccatcataaaaaacagggagatacgctttttgataggaatcaatcaattacatgaatataaactatcaataagatagcctgtgcctattacccagatcaggaatggcatatcatgattgcggcgagagcaggattgaatgttctgaaaatgaaaaacaacaccaaatcggtatttttataaattccattgatattagtgcgttatattttttgacaggttaataaacgtgatccaccgcacgctttgtcgcccaccaggcggagcgaatgactacccttaaagaaaagccgataattagcgacgaatttcggaggttggatccttatgctcaatcagaaaattcaaaaccctaatccagacgaactgatgatcgaagtcgatctctgctatgagctggacccgtatgaattaaaactggatgagatgatcgaggcagaaccggaacccgagatgattgaagggctgcctgcctctgatgcgctgacgcctgccgatcgctatctcgaactgttcgagcatgttcagagcgcgaaaattttccccgacagtaaaacctttcccgactgcgcacctaaaatggacccgctggatatcttaatccgctaccgtaaagtgcgccgtcatcgtgattttgacttgcgcaagtttgttgaaaaccacttctggctgccggaggtctactccagcgagtatgtaagcgacccgcaaaattccctgaaagagcatatcgaccagctgtggccggtgctaacccgcgaaccacaggatcacattccgtggtcttctctgctggcgctgccgcagagttatattgtcccgggcggccgttttagcgaaacctactattgggattcctatttcaccatgctggggctggcggaaagtggtcgggaagatttgctgaaatgcatggccgataacttcgcctggatgatcgaaaactacggtcacatccccaacggcaaccgcacctattatttgagccgcagccaaccaccggtttttgcgctgatggtggagttgtttgaagaagatggtgtacgcggtgcgcgccgctatctcgaccaccttaaaatggaatatgccttctggatggacggtgcagaaagcttaatccctaatcaggcctatcgccatgttgtgcggatgccggacggaagcctgctcaaccgttactgggacgatcgcgacacgccgcgtgacgaatcctggcttgaggacgttgaaaccgcgaaacattctggtcgcccgcccaacgaggtgtaccgcgatttacgcgcgggggcggcctccggttgggattactcttcccgttggctgcgtgatactggtcgtctggcgagcattcgtaccacccagttcatccccatcgatctgaatgccttcctgtttaaactggagagcgccatcgccaacatcagcgcgctgaaaggcgagaaagagacagaagcactgttccgccagaaagccagtgcccgtcgcgatgcggtaaaccgttacctctgggatgatgaaaacggcatctaccgcgattacgactggcgacgcgaacaactggcgctgttttccgctgccgccattgtgccactctatgtcggtatggcgaaccatgaacaggccgatcgtctggcaaacgccgtgcgcagtcggttactgacacctggcgggattctggcaagcgagtacgaaaccggtgaacagtgggataaacccaacggctgggcaccgttacaatggatggcgattcagggatttaaaatgtacggcgatgaccttctgggtgatgaaatcgcgcgaagctggctgaagacggtgaatcagttctatctggaacagcacaaactgatcgaaaaataccatattgccgatggtgttccccgcgaaggcggcggtggcgagtatccgttgcaggatgggtttggctggactaacggtgtggtacgccgtttaattggtttgtacggcgaaccataatatttttacagccagccgctaacttcctgctggctgtaaaattatcctcttcaggaggagatatttaacatcattgccgcctgggtgcgatttttcacttccagacggcgatacagggattccagatgcgcttttaccgttccggtactgatattcagcgctctgccgatctccttattactttcgcccgccgctaacatggttaaaatctcccgctggcgggcgcttaagcttttgagatctttaatgtccttttccggcgtcgtccgccagtctccaggcagaaacatcatccccatcgccgcactatttaccgccaacgcaaatgtctcgacggtactatcacgaggcacaatggccagcacattaaaatggataacttcctgtaaccaccgtttattgcaatccgtcgccgtaattaacaccttaacctcaggaaattgcaccacggttttttgcagcaaccagtagcaaaactcaccatcctgatcgccatcgagcataactaaggcttcagggtaactttccagcttttgccataactcgtctgcctgactggccccctgaatactcactcctggaatacgctgctgtaaactgattttcattccatgaataaatatactctgcctgtcaaacatgactatttgcataactgaatctccacctgaatacgttaaaaagacttaagtagtggaagggtattacccgcgagaaaaaataagaattcgccatttggcggtggccattctacagagatgacgtgtagaaaatagttaccgatataaatagttacagctaaacgcctgaaattacatgtcgagggcactatttaaaacaattttgaggatttccttatattggtggttagtacgcatgcaattaaaaatgaaattccgcgaccacaagccaaaataacaaacggcaaggagacaaaaataagcacaaatagccaacacgtcctctgttcactttaaagggaatcgctgaaaaatacgctctgtttaaggggattcacctttctcagaaagctattccgcccttttcctgctgagaaatcgccacattcggcatgacaacattgtgaaacccggcattagatgttagaaaaaacaataaacaatgcgatatgcgcgttactgtttcgctgtgaacaacaaagcgtcaaagaaatggataaaattcacgcaatgcagttgttcatcaaagtcgcggagctggaaagtttttcccgcgcagcggatttctttgctttgccaaagggaagtgttagccgccagatacaggcactggaacatcaacttggcacccagcttctccagcgcaccacgcgacgggtcaaactcacgccagaaggcatgacctattatcaacgagcaaaagatgtgttgagtaatctcagcgaactggacggtctgtttcaacaggatgccaccagtatcagcggtaaattacgcatcgacatcccgccaggaatcgcgaaaagcctgttactgccgcgcctgagcgaatttctctatctgcatccgggaattgagctggaactgagtagccatgaccgtccggtagatattcttcatgatggttttgattgcgtgatacgcactggcgcgttaccggaagatggcgttatcgcccgtcccctcggcaaactgaccatggtcaactgtgccagtccgcactatctgacgcgctttggttatccgcaaagccccgatgatctgactagtcacgcaatagtgcgttatacaccgcacctgggtgtacatccgttaggttttgaggttgccagcgttaatggcgtccagtggtttaagtctggcggcatgttgacggtaaacagtagcgaaaactatctcaccgccggtcttgccggtctggggattattcagatcccgcgcattgccgtgcgcgaagccctgcgtgccgggcggcttattgaagtattacctggctaccgtgccgagccgctctcccttagcctggtttatccgcagcgtcgggagctttcccggcgtgtaaacctgtttatgcagtggctggctggcgtaatgaaagagtacctggactgaccgactatactttttaagaatgaccacgacagaaggacaaaagagcggatgacgcaggaaaacgagatcaagcgtcccatccaggatctggagcacgagccgattaagccgttggataatagcgagaaaggcagcaaagttagccaggcgctggaaaccgtcaccaccactgccgaaaaagtccaacgccaaccggttattgcgcacctgattcgcgcgacagaacgctttaacgatcggctgggtaaccagtttggtgcggctatcacctatttcagttttttgagcatgataccaattttgatggtgagctttgccgcagggggctttgtgctggcctcccatccgatgttgctacaggatatcttcgacaaaattctgcaaaacatcagcgatccgacgctagccgccacgttgaaaaacaccatcaacaccgccgttcagcagcgtacgactgtagggcttgtcggcctggcggtggcactttattccggcatcaactggatgggtaacctgcgtgaagcgattcgtgcccagagccgcgatgtctgggaacgcagcccgcaagatcaggagaagttctgggtaaaatatctgcgagattttattagcctgattggtttgttgattgcgctgattgtgacgcttagcatcaccagcgttgccggtagcgcgcagcaaatgattattagcgccctgcacctgaacagcattgagtggctgaaaccgacgtggcgattgattggcctggcgatttccatcttcgccaactatctgcttttcttctggatcttctggcggttgccgcgccaccgtccgcgcaaaaaagccctgattcgcggaacatttctggctgctattggttttgaagtgattaaaatcgtgatgacctacaccctgccaagcttgatgaaatccccctctggcgcagcatttggttccgtgctggggctgatggcatttttctacttcttcgcccgtttgacgctgttttgcgcggcgtggattgccaccgccgaatataaagacgacccgcgaatgccggggaaaacgcagccttaaaataggccggatgcggcgtaaacgccttatccggcatacgattttattcggcctggctccccgtaggccggataagatgcgccagcatcgcatccggctataatgcgcacataacctcttgaaactcgtccccagagcctcttcagccatctatttgggagcaaacaatttcattccaactcataaccccagcatataaatccagttggtaacttttatttaacctgaaaccagttttatccactatttataaaattatgtgaagcatttcatagaagaaaaatcactggcctaaacattatcccctttttgcctgatttttgaccatttccgcgatttgttacacattgaaatatcacttttgctgtgcgtaatatggctattcgttagccaaaaaataagaaaagattatgcaagcaacagccacaacactcgaccacgagcaagaatacacgccgatcaacagccgtaataaagtccttgtcgcctctctcattggcacagccattgagttcttcgacttttacatttacgccactgcggccgttattgtgtttccgcatatcttcttcccgcagggcgatcctacggcagcaacgctacagagcctcgccaccttcgccatcgccttcgtcgcgcgccccattggctctgccgtttttggtcattttggcgatcgcgttgggcgtaaagcgacgctggtcgccagcttgctaacgatggggattagcaccgtggtgattggtctgctgccgggctatgccacgattggtattttcgccccgctgctgctggcgctggctcgatttggtcagggtctgggcttaggcggtgaatggggcggcgcggcgctgctggcgactgaaaacgccccaccgcgcaaacgtgcactgtatggctcctttccgcagctgggcgcaccgattggcttcttctttgccaatggcactttcttgctgctttcctggctactgaccgacgagcagtttatgagctggggctggcgtgtgccatttatcttcagcgcggtgctggtcattatcggcctgtatgttcgcgtgagcctgcatgagagcccggtgtttgagaaagtcgctaaagcgaaaaaacaggtgaagatcccgctgggtacgctgctgaccaaacatgttcgcgtaaccgtactgggtacgttcattatgctggcaacctatacgctgttttacatcatgacggtctactctatgacctttagtaccgccgccgcgccagttgggcttggcctgccgcgtaacgaagtgttgtggatgttgatgatggcagttattggttttggcgtgatggtgccagtcgctggattactggctgatgcctttggtcgccgtaaaagcatggtaatcatcaccacgctgatcatcctgttcgcgctgttcgcctttaacccactgctcggttctggcaacccgattctggtttttgccttcctgctgctggggttaagtctgatgggtctgaccttcgggccaatgggtgcgctgttaccagagctgtttccgacagaagtgcgttacaccggagcaagcttctcttacaacgtagcgagcattctcggggcttccgttgcgccatatatcgcagcctggttgcagactaactacgggctaggtgcggtggggttatatctggcggcgatggctggcttgacgttaatcgccctgctgctgacccatgagacgcgacatcagagcttgtaataagagtgaaaagcctgatgcgctacgcttatcaggcctgaatttccatacaatatattgaattcgcaaggatttgtaggccggataaggcgttcacgccgcatccggcatgaacaaagcacactttgccaacaatctaaatctgtttaattgccggatgtcagacatccggcaattatcatcacttcttcatctggctcaaaatcgtccgacactgattagcctccccttcggaaggactgatcagtgccagtaacgccgccgccggtgttaccagcgttgccagtgccgcagcaacagcaccacgggcaatcagcggtccggctttcaccccagcctgcggatttttaaacgtcccccgcacatacagcgggctacgcagtgtgataatccgaattcctttactctccggatcaatagtcaaatccagctgttcgctagcaaaacttgccgtgccggtaacattaatcaacgcgttctcagtatcgaaagcaaaaatctgcgggcgcgccacgccgttggcaatattcagattcgccgccgcgcagttcacccgcacctcatcatcaccaaatatcgcaccgacaatgtagttgccgacattcagcccaacaatctccatcaggttgcggctcaccagcccgtcattcatcaacagtttcaggttgccgttactgttgcctaaaagtgccgccacgctgttaccgctaccgcgtagttccgcgtcaccgttcatttcccccagcgtcttctgcatcagttccacatcgggcatcagttctttcagtttcagtcgacgagcctgaatatctgcccgcccctgcatcggctttttatcgccttccagatgaatattcgccgcaatgctgccgcccgccatgccaaatttcagcggttgcaggcgcaggtcagcatttttgaggatgatatgagtagaaagatcgctaatcggcaggctactgccatgctcaatgcgccgccctttgaagcgaacatcggcatccataacgtcccatttatcggtttcgaagcggtcataaggcagcactttgcccgcaggctgaacgcttttttcgcccttcttctgttcagaccgtttgctcttttctgcccctttcccggaatcaacgccaatcaacggtcccaggtccgccagccgcaattgccggctctcgacatcaccttccagttttggtcgtggctttccggtggtgtagaccagagaaccgtggatatcgctatcaccaattcgcccattaaaaccgcgataatcaaagacgctgcttttttcagtgtcgattttcgctaccagccgaccatccgtttcaaacggcggggtatcgggcagcagaacgcccgtcagttcatagagatcacccagactatcgccagaaaatttaagccgtaaatcgacaccgcccatcttcattgggtcattcacgacgccatcaaaagcaacacgggtgttaccagagcggaaatcagcctgtaccggaaacggcgtcccttcgccacgcagcgccagcataccgcctatttttcccgtacccgtgagcggttcaccgttatatcgtccctgcgccttcaggccaaaaacgtaatcgcccaccttttctttatccgctttacctttgcttccagtaacttcgctgaacggcagcggcttgcctaagggatcaacaaaaatctccagatccgctttgcttactttgtcatcaatggcgatccgcccttgatcgaaaagaatattatccagccgaaagctccatgcgctcggctttgcattcgcgtctttgttatcatcgttggcaagattaaacgtccagttattgttcttttcagagaggcgaatcaggcgcgcgtcgggcttttcgagcttgatccacggcagccagaccgttttggtcagcagcgccagcggggccagcgttgcctctacgcgtggcaaatgcaccatcgtgacttcgggaatatccggtggattgccaagaatgatgtcttccgcgtgtacatggggccacggcacccagctgcgccagccagtttcttgtttttgccgctcccacaccacgcccagatcgccacggatagcgaacggacgattcaactccgcagagactttctggttgatagtcggtttgagtcgattccagtcaaaagttgcaatcaaaatgatcgccacgacaatcaacaacaagaaagccccactaatcgcagcggttattttgcctgccttgctcatcgttcgcttcctcatattcttcctgtgccagtcctaaagatagtccagccaggcggaaaatgaggcagcttatagcgccagaaccgccgtattcagcgtttctatcggtgccgggcgactaagaaaccagccttgtgcggcgaatgcggggctgttctgaacatcacgccactcttccggcgtttctacgccctcgacaatcaccccgcgacaatagcgattcattagatgtaaaagctgagaaaagagtgtgcgtccttccgggctctgacgcagcatcacaaacagttctcgcgcgattttgatgtagtcataacgcacttcacttagcgcagagaaatttgccatcccggtaccaaaatcatccagccacagcgggccaaattcacacatgctggcaaaggtactatctttcggcagacggatatgctccaccagttcgaaacgcagccagggaagacgctcaatctggcgcaggatttttggttgctgacgcagggcgatgagcgtagggccatcaatattgacgcttgccagcaggccgtgctctataaagaagtcggctttttgcgccagcaaatcaatctgctctttcacaacctccatccgatggctgacggtgatttcagtaaaatagcgatccggcggcaggcgttggctagggttcaagggatgcgtgaccaccgttaatagctccacggccattaaccgcccgcatgtttgatagatcggctgccaggtgtaagcacgctcacactgcaaccaaaaacgccgttcctgcaagctctcgatgcttgcttcagggttgcttattcgctggataacctgccttatcatcaaagatgtcctgtgtttaaaagtgatgctgcccggactcgacaaagattatcggcgcgtaagggcagaactttaccgcctggccggggtaaatttcctcactccacaacggaatctttcaggaatacgttctggctcaaaaaaataatggaacactgttttaatatggttgaccagcaaaccaccacagcgcaaactaacgctaattttttacagatcaggttcacgactatgtccaaaaagattgccgtgattggcgaatgcatgattgagctttccgagaaaggcgcggacgttaagcgcggtttcggcggcgataccctgaacacttccgtctatatcgcccgtcaggtcgatcctgcggcattaaccgttcattacgtaacggcgctgggaacggacagttttagccagcagatgctggacgcctggcacggcgagaacgttgatacttccctgacccaacggatggaaaaccgtctgccgggcctttactacattgaaaccgacagcaccggcgagcgtacgttctactactggcggaacgaagccgccgccaaattctggctggagagtgagcagtctgcggcgatttgcgaagagctggcgaatttcgattatctctacctgagcgggattagcctggcgatcttaagcccgaccagccgcgaaaagctgctttccctgctgcgcgaatgccgcgccaacggcggaaaagtgattttcgacaataactatcgtccgcgcctgtgggccagcaaagaagagacacagcaggtgtaccaacaaatgctggaatgcacggatatcgccttcctgacgctggacgacgaagacgcgctgtggggtcaacagccggtggaagacgtcattgcgcgcacccataacgcgggcgtgaaagaagtggtggtgaaacgcggggcggattcttgcctggtgtccattgctggcgaagggttagtggatgttccggcggtgaaactgccgaaagaaaaagtgatcgataccaccgcagctggcgactctttcagtgccggttatctggcggtacgtctgacaggcggcagcgcggaagccgcggcgaaacgtgggcacctgaccgcaagtaccgttattcagtatcgcggcgcgattatcccgcgtgaggcgatgccagcgtaaacgcagcatatgcaaaaggctggataaagtgttacccctctatccagctcatccataaatacctgatggttgtgctaactcatcaccatcaggcattactgtgcaggtggaatatccgtcacttcaggatgtacgtcatccgtggcgacagaggtggtcgcagcggcggtagatggggccatgatttgatcccagaccgcctgcaacgctttcatgttaaattccggctcgcctttcggctgcagcagtattaacgccatatcattgctcaactgttgacgcagatcctgatttaacatctctaccgtcaggctattaaggaaatcctgccgcagtttctgatattgctccggcgcgatatcgacaacctgattttgcaagctacgcatccgctgacccatcagaatatcggtatcagctcgtgcataggcggcaaacagtttctgcagctccagtttcttttgcgccactaacgcattgaactcttcttccggcagacctttatcgcgaaccttcgccagttcacgcgccaccagattaaggttgctgttcagcttgtcgtttggactttcgatgttgatggcacactgcgcacgcagatacagcacacggcagtcaaatccaagaccgatgtctttgctgttactggcacttaacgcttgctgaacatgccagaacagcgcctcgcgggccaggtccgcacgccagtagcgcagcagtgcggcactttcacgaatcggctgccacggcgtatcccacatgatagataaccggtcctgacgcaccgcgtcagtcataatactcaccgcttccgcacgcagcggagaaagcgtcggcaccggagctggcgtttcacgtttgcctttcagttcgccaaacgttttgtttatttggtcgacaacgctgcgcgcatccacgtttcccaccaccagtagcgtcattgcatccggggtgtaccatttctgatagaaatctttaattttttccgcttcaacgggttgtttcagcggatcggcaggatcgtgacctaacaaggtactccctttcagacgatagcgccaccagccctctttagtatcggcaggccaggttgccaccatgtcctgactttgcagcgcgtggttgatggtttctggtgtgatggtcaatttgccagtggcatttgccagataagagagcgcttctttcagcaaatcgttacggttattgggcaaactcagattaaacagcgtggtgtcataagagacaattaccggcggcatcgggcgtttagggtcgatcccctgctgccacaaactacgcgcctgtgctgcgtcaaggccaccgctttgcgttagcgcaatacgagggatggcgtgactgtaaccgctctgttgtgtactttcggcgaggctaccggtattaaccagcaggcgaatttcaacacgatcgctgggacgctggggggtggtcagcacttgccactgtaaaccgttggaaagcgtcccctgttgccatgctggatcaggctggagcgcatctgcctgcacatagccagcagtggccatcatcagcaaaccgcccgctaaaagtcgaatttttgtgccctgcatgtgaacccctgatcaactatcctggtaataaaaaaactgcccgttgtcggtcagtctaaatgacgttaaaaacacttcgtgttagaccgcaagaacatgaaaatgtcacggaagaagtgaaataaacctgaactcacccaggtggtaagttcaggcacaggggtcaattatgcgcaaacacccgcactcggggaagggagtgcgggcataagtgatgagattaagaggataattcgtgcgttttgccatccggcgcacgattattcagcacatcgtccagttttttgtggtccagttctttcacccacttagcaacgacaatggtcgctacgccgttaccgaccaggttagtcagcgcacgagcttcactcataaagcggtcgataccgaggatcagcgccagacccgctaccggcaaatggcccaccgcagagagcgtcgccgccagcacgataaagccactacccgttacccctgccgcccctttagaagaaagcagcaacacgattaacagcgtgatttggtggacgatatccatctgactgttagtggcctgggcgataaacaccgccgccattgtcaggtatatgcttgtgccatcaaggttaaagctgtagcctgtcgggatgaccagccccaccacgcttttacggcagccgagtttctccatcttgtcgagcatacgcggcagcgcgctctcggaagaactagtccccagtacaatcagcagttcttcacggatgtagcggataaatttgaagatactgaaaccagtcgctttagcgatactacccaataccagcaccacaaacaggatacaggtaatgtagaaacagataatcagctgccccagttgcaccagtgtgccgacgccgtatttaccgatggtaaacgccattgccccgaacgcaccaataggtgccagacgcatgatcatattgatgatgccgaagatgacctggctgaaactttcgatgacgttaaaaatcagttggcctttgctgcccagacggtggagcgcaaaaccaaacagtacggcaaacagcagcacctgcagaatgttaccgctggcaaatgcgccaatgacgctcgccgggatgacatccataatgaaggcgacaatgccctggtctttcgcctgatcggcgtaaaccgctaccgctttcgcatcaagcgttgccggatcgacgttcattccggcaccaggctgcacgacgttaacgatgataagaccaataatcagcgcgatggtactgacaatttcaaagtaaagcagtgcgactgcgccggtacgaccgaccgccttcatgctttccatgcccgcaatgcccgttacgacggtacaaaagatgacaggagcgatgatcatcttaatgagcttaacgaagccgtcgccaagcggtttcatttgctcgcctatttcaggatagaaatggccaaggagaataccaatggctatcgctgtcaggacctgaaagtaaaggcttttaaacagagaggttttcatagggtgtcctttagtaaaaccacaggtcttgtaaggttatggggtacctgcggccttaaaataacacccagacaacatcacagaaatgtacctggatcataattgaaacaaaaaggttaaaaagtttgagctggctcgcacaaaccagcactttttaaagttttgtaatcagtttggggtagttacttttcttccaggtaactctcttcgaagatttcaatagggagtgggcgagcaaaaaggaagccctgggcaataccaacgcccgcttttgccagccagtcgcgttgtgcttcagtctccacgccttcggcaatcatttgtaagttcaggctctgcgccagcatgataattgcagcaatcatgctgctatctcccggcaagccttcaacaaacattttgtcgattttcagtacgtcgattggcaagcttttcatatgctgcagctgacgcagccctgcgtagcccatgccgaaatcatccagcgccacccgaactccggcattgcgcagcggacggaggattgccaccgcagcatgagggtcgtcaatacgtcggctttctgtcacttccagaatcagtgttcccggctgaatgcgatagcgggttaacagttccagcatatccgccaccatattcgggtgcatcagttgcagcgcagagaggtttacgctcaagggcagcataatgccgcgctcttgccaggctgcaagcaatcgacaggactcttccagcacccagtgaccgacggtaaccatcagcccacagcactcaatgcgatcgattaagccatccggcaggtcccaactgccatccggttactggatacgcagtaacacttccgcactgaccagtttaccgctggtcatctcgacctgtggctgtaaccaaatagcaaactgatgattttccagtgcattaaggatatcgctctcttccgtcaaccgcttctgggcggcttccatctgctgcggatcaaagaactgaatctgattcttgcctttatggcgagcggtaaatgccgcagaaatagcgcgactgtaaagctgttcggcggtgagatcgccgtagaacatcgccacgccaatgctacagtgcggacggagttgaatacgttcaatcggcaggcgctcgctcatgatagtgagcacttgctgacctaaggtgattgcgtgccacggttcctgtacaccgttggcaatgacagcaaagtcataaccgctaatctgcgcgaggatcatacgtgggctcagtacgcttttgagtttttccaccagcgtcagcagcagaatttctcgttgcgcctctttcagcacgcccgcagtatcacgcagggtttcacaggtgatgatcatcagcgcggtggtttgtttacgcgcgacaacctgctccagcatctccatcagcaaggctttgttcggcaaatcgctcaccgggaagcgcatcgcattttcgttctgttcttcataatggcgctgcagcaattgctggttgaggttgtaactgcgcaccaacataccgatttcatcgtcctgatgcagacgcggtaatgccagttggtgaccaacaagctccttggctgggatggcgttaagttcgcgagcaatattgcgtaacggatgcaaaatcaggcggttaatgcaccagctgatggcgacggtcaggataaggctcaaaagtaagtaaatggtcactaacgtactgagggtgctcatcacgaacttatacatacggaaggaatccgcctgtagtaccagataggcaattggctgcgggtttgccggacgttcgaggctgtaaacgcccaggctgatttgaaccggtagctcaaacaggcgagtaaccattaccggcaccgggcgctctggaataaaacttttacgcagcgcctggaactggttaggcagcactacatcggcacggctgaccacgcctgccggtttaatgctggcaagaatagcttccgcttcgggaatatcgcctttcaaaatagcactagataagggttcgcggacagagcgagcaatgctttccagttgcgtagccgtgttatagcgattctgctggaccagatggaacagcaaaacggtgcaaaaaataaaaacgaacaccaggacaacggctgccaccattgccatctgcttgattgttaacgagcgacttacgcgcaaattgtctccccccggaaatcccagattgccgcccgagtatacccgatcgcagcggcattaagagaggcgctatctgaaaacttaccagtcggcgtaaggtatcagcggctgcggcggtaaatccatgtcaccctgccatccggcggcggaataacgtacgtagagcaggaaatggctgggtgcgtaatctttcgcctgctggatatcaattgccgtgccaacaaaccagttggaagtaacacgtcgttcaagtaatgcccgcgccgtgtagccgaagccctgactgctgccgccatcgttggattgccgcgcagcttcttcctgccagtcggtcgggatcagattcatcagcggataacgcggcatggttttggtgcgactatggctccagctgccagacgcacccagctcccagctccagttttccgtgcgctcccgccacatcaccggtatggcaaagctcaggtattcctgcggactgtagtaaccgccctgaccgagactgtagccactcagatctttgtcgtaatgccagatcatgttgttcaggccgattgtgacgcggcgattgttctggttaatgaccttatagtaatagcccgtcatccagcgcacgcgccagttatcttcgacatttttaccggttaactggtcgccactaaggcttgcccagacgccgtttgcttcacctttatcgtagctcagacttagccccacaccgtcggcacgtacgccaccccattttttcccggtattgctcggggagtctttttgcccaccaaaggccagcaaagaactggagatgggccgacggtgggcgttaacggtgtaacccagcggcccgatatcatcgctgtaactgatgccgccgaccacatccaccacgttgaagcccatcggcgtggtaccgatatcccagctccagacgtcatttcgccagccgaccgccacgctggcaccggaatcgctctggctgcggttgccgctacagtcctgtaatgtacaggtgccccagttgtcatcccatttgccatcggcattagtggagaaactgccgacgttcatattgacgaaatcactgcgaaagaacatccgcccgtcagaatacggcgcatccacctgcaacatggtagtgtgcgctttcagatcggagtaaccaccggtgccgctgctaccccagtaatcgtgctcaagggtgacgttaagatcctgctggcgatagaggtccgccgcatcgctgcgcacgccacgtttcagccagtcatctttctcgtcgttacgggtcagtcgggtaaaggtgtcgttatcctgcggacgcgtcgtagtcacaccggatgcgaccatggcgtctttgtaggtttccagcgcctgcgttggatcgcccgcctgcgcttcaaacttcgcaccatcacgcagcaccatcgcgctttccatgctcggtggctgagattttgcctgcgggatcaacttattaaacgtccgctgcgctgctgcggtatcgccaagctgcgcctgtgccagcgccacgcgccgctgtgtgttcaggctggcgttatcggtagcgggcagtttcgccagctggctacgtgccgccgctttgtcaccggcagcaatatccacttccgtcagaccaagaatggcgtcggcgttagctggctcccgcgtcaggacattctgatatgcagcgcgggcggcggtgtaatcacgtcgttgttgcgcccagtcagccagcgtgaggtcaatacgcgtggaaggtggttgctggcgcagcatcgcttccgcttctgcctctttgccgctttctcgcaggcggttagcggtttccagcacctgatcgctttgcagtcgattaaccagctcctgaatattgctgttccactgcgcacgcggcaggctattgatatgcgccagcgccgctctgtcctggtcatgaccagagaggtacagcccgtaagcgtaaacctgctccgggtcgttgctcttctgctgcgccagattgcgcattaacgtatcggcctggctgcgttgtccggcctgccagagatcctggctaagtcggtaagtaatccatacgctgccggggtccagcgccagtcgttgccgctgaagtgctgccgcctgcgcccatttgccctggttttccagtgcctctgcctgctgtgccagacggtcgttttgcaggctgcgttcgatatcatcaatgctacgccgctgactggcagagaggctggcgataaacgcttcagctttttctgggctttgctggcggtaaatatttgccagcccgcgcacggcgttagtgttgccgctgtccatacgcaaggtctgctgataataacgttcggcggcgggataatcttttcgcgccatcgccacatcgcccagccccagcactgcataactgtcggtgttatcgacattacgcgcctgctggaacaggcgttctgcccggtcaggattattggctttcagcgcagcatcgccctgctggatcgccagccagtagcggtttactttcagcagactgttccatttgtcgttgttgctgctgtgcgggtccagtgcgagggctttttccagattcgccactgcattggcgcgatcgcctttctgagaatacgcctggcccagcgcccccagagcttcactgtctttcgggttcgcccgcaccgcctgttgtagttcgggaatggctttacccgccataccagagtccaccgccgctaaaccttgcgcacgagcgcggaaagcaggatcggccagctgtttttgctgttctgccagttggctttgcgcagccgccacgctatcgccatcactaaagatgctgagatattttttcagcgcgctcacactggcatcactgacgggcatgtctttaatctgcccgtaccagattttagaggccccttcgcgcccggcgttgctttttgccatctgttccaggacggcaaaaccttcgtcacggcgatcgctactaaacagcaatagcgccagattgttttgcaggcccgtattgcccggtgcatccgcattgatgcgttttaactgattaatcgcttcgccacggcgagccggaattttcgccaccgtactccagtactcgacagcaatgtcaccttccggcggcgcaccgttgaacagtttgttgtaactcgccacagcttcttctgcatgaccggtcgtcgcctgcaatcgtgcctgttgcagtgcctgacgaccatccggcgtggaaagtagcatcgtagtccggctgcttttatacgcattactactcggcgctaactggctcagccgatcgagctgtttttgcgcgccatcaatatcgccctgacgtaacaaagaacggaaacgggcggcaacgacgtccgggttattcggatcaataagttccagccgatataagctctgttgcaccagatcttcacgatgggtcgcttcgcctaaccgaacttgctccagcaactgttgctgagcggttggtgctgcctcgaccatcggcatgacggccagaccgagggaaagcgtgaatatgtttagtgtgaatttgcgcattcctggccccagtcaggtaattactttagtgactatttgcgcattcctggccccagtcaggtaataactcaccttttgtgctgaagcggaaacggtgttgatcccagccttgtccaaacagggtcagcacatagttgtaataggcatcgctgccgggaaagttatcggccacgcgctggcgctgaacggcctgcgcatcgcggttttgtaaaaagggcagcatggcggcagaaaaaccgactggtcctttaccctgcgctttccccgtagccacatccactttttccggcggataaccgtttttctcagtgaatgtcgccatcggtttaaaccggttgagcatccgcgctttttgcggatcgctgtcaggcatcatgcctacccacatgtaaacgcggatagcgtcgtagctgctgatcaatgttttttcggcttttagctgccagcctttgtctttctcatagcgcacccagtctgggctaaaacctttcggggcggtttccagcaataaacgttgattggtttcgcgcagcgtggtccacggcgcgccaaagcgggtgaaatactgcgccagcgtcggcggcaggtagctggggttaaaacgccagctgttatcctcagcaaaacccactttgcccggtaacaacatggaacccagcccaggcaccgtcaccacttcctcccgcgcgatacgttttagcaacgcgctgccgatgtcggtataacgctgctctttccacaaacgccccgcctccagcaagctccaggccatccagacatcaccatcggaggcgctattgctgtccagcacttcccacttactgttctctttcttgccccacagccaggcgggcaaacgttcttttaaagaaccctgagcgagattgttctgcgtccagtcgagaatattatcgaaagctgcacggtcgttagccgccagggcagagaacatgccgtaactttgcccttcggaggtggtgattttgcgcgcgtcgctggggtcgatgacgcgcccttcctgactgatgtaatcctttttaaactgctcccaggcaggccaggtacaggctgcctgaacactaaaggcagccagcagcagcatcgtcacgattccactacgcaacacattcatcttcaattactcgttatccgggttaagacgacgacgactaataattcgcagcagacgccacagtacccatgccagcaatatcacactgatagccgccagcaccgccagcagaatcggatggtttgccagcgcataccacacgcgctcgaaccacggcagatgacctacgtaataaacgtcgccaacacgtaggctgttgataccggactcgcggatcaccgcgacgctaccgaacatggtggcgcgtttgccgctatcgttcaccgcatcgttaagcatttcataaccgcgtgggctatctgccaacagcgcaatcacgctgcgctggtcgttatacgggctctggaagccaatcaccgccgccatcgcaccggaagaggtcagcgtactccgggtttctgccgcgcgatcgctctcgtccggcacaatgccggggaacggggtctggcgcatcggtgttttcacccagctttcggtcgcctgcaccaataggtcgatctgcttatcgtctttcagtttgtccgggataccaccgatgatcatgatgtcggcatctttgccctgaatggtgctgccatcatcggtcaccgtcagattaatcgccgggaagcccgtctgtgcgccgataaaaccaacagtattcagcaacgtttccatctgtgcttcgttaggcgctttcggcatcacggtgatggtttggctcagatccgccatccggctgaatgggaagcccgcgttagcaaaggcgcgtagatccggcatcgggatgaagtggtaatacttgctgaagtcgatggtggagtcgtcaccaatcaccacatgattctgcaccggctggaaggtaatacagttatccacgctaccgcccggcatcgggttcatatactcaaagtcgaagcgcagctggttggtcgcgcccagtttcagcgccggaatagagacatctgttttgccatccagcaaaccttgtaataccggaatccgcagcagcaggcggttcgcctcctgtttgctgctcaggttgaaggattgcaggaactggttattcaggctgatatccatccggctactgtctttcaccggcggcatggtgtagcggtaattaatatccatatcaatgccggtactgcgcatcaggtagagatccggcggcaggtttaggctaacgttaatcgctgctggctcaagaccgctggattgtaactgttcttcataggttttcagttcgccaaatgtgaccggacgatcggtacgtacccagttcggcgcatcgtacggcttacgcggtagcagcggtttcacttcattcactaccacgctttcaccacggaacagaatgttaccctgagcgatacctttcgctgcctgcaacaggtctttgtcgtcacgaccaaacaccaccagcagtttgacgtaaggattctgcggatggttaatcatctcaatcaccggggcttttaccgccggatgatcgcgcaggaagtccggccgtttgtcgttggttgcaaagacaatggcattgcgatccggcagttggttatagagtaccgggaagttctgcccacgccagccagaacggctaccaaaccagctggcgacaatggcagaggcttgttgcagcccaacatccggcgcacccgcaaagaccatcggcaaggtgttggtgcggttatcgctcgggtcaaagaatggcaccgggaagtgactcaggtcattcttcacattcagggtctgataggtcagatccagtccactgctccgcccaacatccagccaaagcgtggtgctggccggtttttcgcacacgtcctgataatggccgacaaactccagccgtacacggttgaagtcgctaataaacagtgggttaatgggcatttgcgccagcgtttttttacccaactgttctttggtcactggcagcacgcccatcagttcatcattgagataaacctttaactggctctggacaggcagtaagcttgggcttggggtgtattcgaagttgagcatcgccttcgtcaccacttcatcgctgcgcataccaaactcaatgctgccgttcgggttaatgccacgtagcaccatgctgcccggcggcggtgcaatttgcgcaaaggtcagcttcacatcacggctaggaccgttctgcgccacgactggcgcatcagcgccctgcacgcccggcatcacttgccccacctgcggattttgttccgtctgggcggctacagctggctcagcattgatcagtggttgcgttgctggcgtcgcctgcgtcatgaaagaggggaacgcactcatccccatagccactgcacaaatccagaatagttttcttttcatcgcgttatcatcattgttgagccaaagcctgatcgcttggttgtgccgtttcgctccgctccgggcggcgcggaataaagcttacaacccaggaaaccagagaagtcagcacacggaatatgcccttcacgctagaaggcgcaaactccgccagatggcggtagccacggaagccgagcttcagaatatccagcagactttccagcggcttatcttccgggtagctgtcctgccagagcgcccatgtatccgcacgggcaaacgtacactgcacaaaatcgatatgttgctgggtggtgagcggcattaatttcagcccaacttcattacccatcacgcgcgccacctgggtcgggaagacgtattcctgctgaccgcgtttaagcaacagattcactttctgcccttccagaatctgcgcctgaccgttgatcttgatccccaaaccaccgtcggagaaatcctgaacggtacagctgaagaggtgaccatcttcgcgggcaattgccgcgggcatcgtcatctccacgcggtggcttcggcgtacctgtttgctttctacgcttaccgcaactgcgccgccaagaacaatcaggttgtagaacacccacaccatactgacgaccacggtgagcatctcggttggcgggccatagaagtagcgccagatgcctaccgcaacgcccaccaggttgagcaggacaaggaagatgtagggccggctgatcacccagtcgacgtactcttcttccaccagtccacctttggcggtgacgttaaatttgcctttgtgcgggttaatcagcgccaccagcgtcggtggtgcgatataccacgccagcaccgtttcgtagatttcactccagaaagagtggcgatatttgccctggatcttggagttggtcaggctggcatggatcatatgcggcagcacgaatagggcgatcatcaacgctggcgcatagatgatgtaggcatgaagcagcaggaacgccagcggcgcagtcaggaagatcagccgtggaatgccgctcaagaagtggaacatggcgttgacgtaacatagccgctgagcaaacttcagccctttaccggtgagcgggttatcgagacggaagatttgtaccatcccgcgcgcccagcgaatacgctgaccgatatgcgcgctcagactttcggtcgccagccccgccgcctgcggaatacgcatatacgcggaggtatagccacgacggtgcaaccgcagagaagtatgcgcatcttcagtcacggtttcgacagcaatgccgccaatttcatccagcggcttacgacgaatcaccgcacaggaaccgcagaagaaagtggcgtcccacatatcgttgccatcctgcaccagaccatagaacagcgtgccttcgttcggcgttttacggaaacgccccaggttgcgttcaaacgggtccggactgaagaagtggtgcggcgtctgcatcatcgccagctgtttttctttcaggaaccagcccatggtcatttgcaagaagcttcgcgttggtacgtggtcgcagtcgaaaatgctcacgaactcgcctttggcatatttcagcgcattgttgatgttgcctgctttcgcatgttcatgagtggtgcgggcgatatatttcacccccacgttttgcgcaaactggcgaaactcttccctgccgccgtcatcaaggatccagatattcagcttatctttcggccagtcgatacccaggctggcgtaaatggtatttttcaccacgttgagatcttcgttgtaagtcgggacaaagatatccacgctcggccacaggctcatatctttcggcaatggcaccggctgacgattcagcggccatactacctggaagtagccgagcaccagcacaatccacgcgtacgtttcagcgaagagcagaataagcccgcacaccaggctgaccggatcgtcccagttcagcgtagaggtgtaacgccaccagatataacggcaagaaacggtcaggctcagcacaatcaacattagcgcgctgaagcgccccggcatccgccgtacgatcagcgctaccccccacagcagcatcaggaagataaactgcgccagcgggttaaacggctgagtaacgcagattaacgccagaatcaggctgaaggtgacgatgataccgaggatcaaccgccgcgccccggcactcaaatgaccgagctcttttttctcatccagatgctgtgttttatggctaacgcgctcaggcagctcgttcatccattgatggtaacgtccacgaatattttgcagaccactaaatgcccgcctgcgcggtttcggcgtttctttgcggcttgcaccgatcaataaccagcatgtttgaatgagataacggaccgggtccagcggacgcggacggctggcgttgatatgcggatacaggtttttatgttctgcgcgaatacgctgccagcgcgggtgctccagcggaataaaaatccaggccaggatcatccagaaacagccgagcgtcgcgctgaaagcgctcgcaccgtgacgacgataatcgcgataacgcccgataagccgcgcgttgaccggcgggataagcaaccaccgggtcaggatactcatgatgcactcccgactggcgtttacatcaacttgcactcccgactggcgttttcagcccggagtagttcaacaggcaccagttcgccagcgtcagtatctcttcagccgccagcgcatcactgcgatattcacctactggttgcttagccgccaggcattcagccatcgcttcatcacgatgaatgagcatcggcagtaatcggcgctggctttgcaaccaaagctggtaaatatcgtcctgaacctgactgccaatacggaagtcattaatcaaaatatgtgcgccatccggcagcgcttgctgatgcagtcggatatggcagttggcatccacattgacgattgccaggctgtgatcgcacaaactcagcagctggtgggttatctggctggcatcacgcggtaagtcgattaaaatccactggtaacgcccgctggcttttagttgctgtaagccggagcaaatatcgctcagccgggtttgccagtgctgtggattttcttgttcttcaatggataactgaccaaaaggcagcaaatcgagctggctggtgtagcgcaacccagcgtcacgccagtcctggccatccagcatcgctctggcccagccctgacggtgggtaaaatcaacattaaaactcaggcgcaacaagttgtccgggcaggcatcgaccaccaggacattttctcccaacatttgtaaactccaggctaatgcggcggtgatggttgttgtccccacgcctccccgcaccccctgctatcccagtacggccattcaccaatcccttacttttgttgcgcaaactctgccagcaacggccagcgttttaatgccgcggccaactgttcgcgttgggaaatatcggcataatcaatatcaggcagactaaatgcctgctttaacgccacaatatcattctggaagatatagcctatcgcgggatcaggcagagtatctggttcattgttattcattttgcttgatccctatgaaataaccgtaccgttcatgagacaattctaaccgtgagcatttcgccggtttattgtttacggcgagacgggaatttgctcactttttgactttccgttacgcaacagaaaaagttaaaaacgaaaagactaaaatcacacgtcttgtgaccttctaaattgattcacatgctaaatctgataagttttaatttcaatggtaggtttatttcttagctttcgctagtaaactgataatcagacaaaatggtgacatgagggacattgtggaccctgtattctctatcggtatcagtagtttatgggatgagctgcgacatatgccagcaggcggcgtctggtggtttaacgtcgatcgccatgaagatgctatcagtctggcgaatcaaacaattgcatcccaggctgaaaccgcacacgtcgcggtcattagcatggacagcgatccggcgaaaatctttcaattagatgattctcaagggccggaaaaaataaaattatttagtatgctaaatcatgaaaaaggtctatactatttgacccgtgatttgcagtgttctattgatccccataattacctttttattcttgtttgcgcaaataacgcatggcaaaacattcctgccgagcggcttcgcagttggttggataaaatgaataaatggagcaggttaaaccattgtagccttttggtaattaatcccggaaataataacgataaacaatttagtttgttgcttgaggaataccgtagtctttttggtcttgccagtttgcgttttcagggtgaccaacatttgctggatattgccttctggtgcaacgaaaaaggggtcagcgcccgtcagcagcttagcgttcagcaacaaaatggtatctggacattagttcaaagcgaagaggcggagatccaaccacgcagcgacgaaaaacgcattctgagtaatgttgctgtactggaaggtgcgccgccgctaagcgaacactggcaactgttcaacaataacgaagtcctgttcaatgaagcccgtaccgctcaggcggcgacggtggtcttttctttacagcaaaatgcgcaaatcgagccactggcccgcagcattcataccctgcgtcgccagcgcggtagtgcgatgaaaatcctcgtgcgggaaaataccgctagcctgcgcgccaccgatgaacgtttgttattggcctgcggtgcaaatatggttattccgtggaatgcgccactctcccgttgtctgacgatgatcgaaagcgtgcaagggcagaagtttagtcgctatgtgccggaagatatcactaccttgctgagtatgacccagccgctcaaactgcgtggtttccagaagtgggatgtgttctgtaatgccgtcaacaacatgatgaataaccctctattacctgcccacggtaaaggcgttctggttgccctacgtccggtaccgggtatccgcgttgaacaagccctgacgctgtgtcgccctaaccgtaccggcgatatcatgaccattggcggtaatcggctggtgctgtttctcagtttctgtcggattaacgatctggataccgcgttgaatcatattttcccattgcctactggcgacattttcagtaaccgtatggtctggtttgaagatgatcaaatcagtgccgagctggtgcagatgcgcttgcttgccccagaacaatggggcatgccgctgcctttaacgcaaagttctaaaccggtcatcaatgccgagcacgatggtcgccactggcgacgaataccagaacccatgcgactgttagatgatgctgtggagcgcagtagttgatataagatgctgtggagcgctcatcatgatgaccatcagcgatatcattgaaattattgtcgtttgcgcactgatatttttcccgctgggctatctggcgcggcactctttgcgacgcattcgcgacaccttacgtttgttctttgctaaacctcgttatgttaaaccggccgggacgttacgccgcacggaaaaagccagggcaaccaaaaaatgactcaatttacgcaaaataccgccatgccttcttccctctggcaatactggcgcggcctttccggctggaacttctattttctggttaagttcggcctgttgtgggcgggatatcttaacttccatccgctcctcaatttggtgtttgccgcgtttctgctgatgccccttccgcgctacagcctgcatcgcttgcgccactggattaccctgccgatcggctttgctttgttctggcatgacacctggttgcctggcccggaaagcataatgagccagggtagccaggtggcggggttcagtaccgattatttaatcgaccttgtcacacgctttattaactggcagatgattggggccatttttgttttattagtggcctggttattcctgagtcaatggattcgcattaccgtttttgtggttgccatactgctatggctgaacgtacttaccctggcgggaccaagtttctccttgtggccagccggacaaccgacgaccactgtaacaacgacgggtggtaacgcagcggcaaccgttgcggcgacgggtggcgcaccggtagtgggtgatatgcccgcacaaactgcaccgccaacaacggcgaaccttaacgcctggctgaataatttctataacgcggaggcgaaacgtaaaagcaccttcccgtctagcctgcccgctgatgctcagccatttgaactactggtgattaacatctgtagcctttcctggagcgatatagaagccgccgggttgatgagccatccactgtggagccatttcgatattgagttcaagaactttaactccgccacctcctacagtggcccggcggcgatccgtttactgcgcgccagctgcgggcagactagccacactaatctgtatcaaccggcaaataacgactgctatctgtttgataaccttagcaaactgggctttacccagcacctgatgatgggacataacggccagttcggcggttttttgaaagaagttcgcgaaaatggcggcatgcagagcgaattgatggatcaaacaaatctgccggttattttgctgggctttgatggtagcccggtttatgacgataccgctgtgcttaaccgctggctggacgttaccgaaaaagataaaaacagccgtagtgccacgttctacaacacgcttccactgcatgacggcaaccattatccgggggtcagcaaaacagcggattacaaagcgcgggcgcagaaattctttgatgaactggacgccttctttactgaacttgagaaaagcggtcgtaaagtgatggtggtcgtggtgccggaacacggcggcgcgctgaagggcgacagaatgcaggtatctggcctacgtgatatccctagcccgtctatcaccgacgtccccgttggggtgaaattcttcggcatgaaggcaccgcatcagggggcaccgattgtcatcgaacaaccgagcagcttcctggctatctccgatctggtggttcgcgttctcgatggcaagattttcaccgaagacaatgttgactggaaaaaactcaccagtgggttgccacaaacagcaccggtctccgagaacagtaatgcagtagttattcaataccaggataaaccgtacgttcgcctgaacggcggcgactgggtgccttacccgcagtaagaacgaaaaaggccgcagagtttcccccctgcggcctggtccgggcgcaaattgccattacggcagcctgacgcccgcatgacacgttacttccgcttgttcagccagttcacgatcatactggcaagaatgccagcaatgaccggagccgctaaatcatgccagaaggccatgcccagctctgcgaacgtcatatagccgcctgtgttgtaatgacaacgtttcgcggctattcttgagtggtctagagtcaagattagcccccgtggtgttgtcaggtgcatacctgcaacgtgcgggggttttctctctccagcaaccaatgccaccagggataaagcccccgcaacattgcgcctcaccggaacctttccggcttgccgctgattctacgattgctttttactgtcagcacccggcaatcttcctcattgcgcgatgccttccagcttaatttctttatttgcaatagttgcagttcatatccgggctgactccagactggtagtgaaatgcgcaattttgtagaattgcgcctcctcgcgacctccccagtgaatctgttgcctcattttttacatactgcgtattcgacttctccacctgttgcgcaagagaaactgggtttattcatttttgcgaggccgacttctttctggacaggactttatgcagcacaacacactaagcaaacacaatcagaaattgccgtttacacgctacgacttcggctgggttttattatgcataggcatggcgattggtgccggaaccgtgctgatgccagtacaaattggcttgaagggaatttgggtatttattaccgcagcgatcattgcttatcctgccacctgggtagtgcaggacatttatttaaaaaccctttctgaaagcgattcctgtaatgactacaccgatattatcagtcattacctggggaagaactggggaattttcctcggggttatctactttttgatgattatccacgggatttttatctactctctctccgtggttttcgacagcgccagctacctgaaaaccttcggtttaaccgatgccgatcttagtcaatctctactttataaagtcgctattttcgccgtactggtggcgattgcgtctggtggtgaacgattactgtttaagatttccgggccaatggtggtggtcaaagtagggattattgtcgtgttcggttttgcgatgatcccgcactggaatttcgccaatataaccgccttcccgcaagcctccgtctttttccgcgatgtcttgcttaccattccattttgcttcttttctgcagtatttattcaggtacttaacccaatgaatattgcctatcgtaaacgggaagcggataaagtactggcaacccggctcgcgctgcgtacccaccgaattagttatatcacgctcatcgcggtgatcctgttttttgcctttagctttaccttcagtattagccacgaagaagccgtttctgcctttgaacaaaatatcagtgcactggcgctggccgcgcaggtgatccctgggcatatcattcatatcacctctacggtgcttaatatctttgccgtactgaccgcattctttggcatttatctcggtttccacgaggccattaaaggcattattctcaatctgttaagccgaattattgataccaagaaaattaacagtcgcgtgctgactctggcgatctgcgcttttatcgtcattacgttgacgatttgggttagctttcgtgtaagcgtgctggtgttctttcagttgggaagcccgttatatggtattgtgagctgcctcattccgtttttcctgatctataaagtcgcacaactggaaaaacttcgcggatttaaagcctggctgattctgctgtacggcattttgctatgcttgagcccactgttgaagctgattgagtaaaccggagcgcatggccccggttttgtgagttaacgctgcggattttcatcctgatcaacagcaaaacaagctaccagttgaccgccgtagtcttttagctgcggctgcaactgggtgcaggggccgaagcgccgacgacagcgggcgttgaaggcgcaacccggcggtggattcagtgggcttggtagttcaccgctgagcttgatgcgctcgcggcgatcgtccgggttcaggcgcggcgtcgcggaaagtagcgcctgagtgtacggatggcgcgggttattgaagatttggtctttcgttcccttctccacgcagcggcccaggtacatcaccatcacttcatcagcaatgtgctccaccacgctcaggtcgtgggagataaagacataagacagccccaactcctgctgcaaatccatcatcagattcagcacctgcgcgcgcacactaacatccagcgcggaaaccggttcatcggcaatcaccacatccgggtcgagcatcagaccacgggcgatggcgatacgctgacgctgaccgccggagaacatatgcggatagcggtcatagtgctcggttttcaggccgactttcgccatcatgctcagggctttttcccgacgctgttctttgcttaagctggtgttgatcagcagcggctcttcaagaatttgcccgacttttttacgcggattcaggctaccgtaagggttctggaagacgatctggattttctgccgacgcagcttctgcgcctgcggatcgtgcttaagcagatcctgcccctggtaatacagctcgccaccggtgggcatttcaatcatcgtcagcaaccgaccgagggtgcttttaccgcagccagattcgcccactactgccagcgttttgccacgttcaaggttaaagctaacgccatccagcgctttaaccagacgttccggcgcgaacatgcctttcttcaccggataatgttttttcaggtcgatagcctgcaacagcggttgttgcagggtggcctcttgcgtactcatagtgtcggcctcccggcatcatcaagtgggtaatggcatttggactgacgcccgtcagcgagcatattcagcgccggttcttcagcgcgacatctgtcagtggcataggggcagcgcgggttaagcaggcagccgttcgggcggtcgtacttgccgggaacgacacctggcaagctcgccagacgttctttgtcctgagcaaattctggcagcgcacgcagcaatgcctgagtatacgggtgacgcggcgcatggaagatggcgtgcgcatcaccggtttccaccacctggcctgcatacatcacgatgattttatgtgccgcttccgccaccagcgccaggtcatgggtaattaacaccagcgccatgttctctttctgctgtagctccagcagtagttcgatgatttgcgcctgaatggtcacgtccagcgcggtggtcggttcatcggcaatcagcagttttggccgacaggcaatcgccatggcgatcatcacgcgctggctcatgccgccggaaagctgatgcgggtaaacatccagacggcttgccggatcgggaataccgacctgattcagcaggtcaatcgctcgctgacggcgggtacttttgttgccgccctgatgcaccttaatcgcttccataatctggaaacccacggtgtagcacgggttaaggctggtcatcgggtcctggaagatcatcgccacttcggcacccaccaggttgcggcgctctttttcactgatacgctgcaaatcctggccgttaaactccagtttttctgccattacgcggcccggataatcaatcagccccataatcgccagactactgacgctcttaccggagccggactcacccacaatcccgaccacttcgccctgttttacgctgtagctgatgcggtctacggcgcggaacggcgcgctttcgtcgccgaaatgcacgcttaatttatctacatttaataacgccatctcgaacctcttactgcttcagtttgggatcgagcgcgtcacgcagaccgtcacccatcaggttaaatgccagcaccgtcagcaggatcgccagacccgggaaggtcacgacccaccaggcgctttgcgcgaactgcaacacgtcggagagcatggtgccccactcaggcgttggcggctgtgcccccatgccgaggaaaccaagagcagccatatcgagaatggcgttagagaaaccgaggctcgcctgaacaatcagcggcgcaaggcagttcgggaagatgttaataaacatctgacgcatcgccccggcacccgccacgcgagacgcggtgacgtaatcgcggttaacttccaccagcacggcggcgcgggttaagcgcacatagtgcggcaaggcaacgaaggtcagtgccagcgcggcgttaccaatgctcgggccgaaaattgccaccagcaccagcgccagcagcagacttggcagcgccagcatgatatcgaccacgcgcataatgatgttatcgaccaggccgccaaagtaaccggcgatcaggccgagaataacgcccataatcaggcttaacacaattaccagacagccaaccagcaggctcaggcgcgcaccgtacatcaggcggctcagcacatcacggcctacgtcatcggtgcccagcaagtgcgccatgctgccgccttcctgccaggctggcggggcgagcagtgcatcgcggaactgttccgccgggttatagggtgcaatccagttggcaaagatcgcgatgaacagcacgatgacgacgtaaaccagcccgacgaccgcgcctttgttgcgtttaaaatagtgccagaactcctgtaacggggtcatcggcaccggtgcgctaatcactttattttcagtaacctgactcatgatgtccccttacttcttatgacgaatacgcgggttcaccacgccgtacagcagatcgaccagcaagttgacgaggataatcatcgtcgccaccagcaatacgccgccctgcactaccggatagtcgcggcgttgcagtgcgtcaatcaaccagcgtcccagaccgggccagctgaagatggtttcggtcagaatcgcccccgccagcaatgttcccacctgcaggccgataacggtcaccaccggcagcatcgcgttacgcagcgcatggacgataatcacccgcatgcgggttagccctttggcgcgcgcggtgcggatgtaatcctcgcccagcacttccagcatgctggagcgtgtcatacgcacaatgaccgccagcggaatagtacccagcacaatggcaggcaagatcatatgggcgacggcatcgataaagttgccgtcttcaccccagatggcggtgtcgattagcataaaaccggttaacggattggagtcatcgaggaacaccatatcgctcacgcgaccggagacgggcgtcaggttccagtgcacgctaaccagcatgatcagcatcatgccccaccagaagataggcatactataacctgtcagcgccaggccaaccgctgtgtgatcgaaaatggaaccgcgtttaaccgcagccagcacgccgaccggaataccgactgccgtagcaaaaatcatcgcgcagacgccaagttccagcgtggcctggaagcgcggcacgaactcttcccaaaccgggatgcggcttttcatactaatgcctagatcgccatgcataacgccccaaatgtaatggagatactgctgccacatcggtttatctaagccgagttcagccagcagctgcgcgtgacgctctggggagatcccacgttcgcccgccatgatcatcaccggatcgcccgggatcatgtggacaaaggcaaatgtgagaagggtaataccgataaacgtggggatgacgagtcccaaacgtcggagaataaactgcaacataacccggattctctatagtgacccgcagcctggaactgcgtgtctgtattgctcacaaatcaattcccgcccttatcggacagggaatgaagtattgctgccggatggcgctgcacgcagaggcacagcgccaccgggtatacagattgttgacaaagtgcgctttgtttatgccggatgcggcgttaacgccttatccggcctacaaaatcgtgcaaattcaatacattgcagaattttcgtaggcctgataagcggagcgcatcaggcatttttgcctttgccatcagtcttgtatggcttttaattattcgatagagacgttttcgaagtgatgtttgcctaatggatcaaccacatagcctttaacttctttacgtaccggttcaaacacggtggagtgagcgatgatcagtgccggagcctgatcgtgcatcaccacctgcgcttgtttgtacagttcaacgcgtttattgtggtcgtcggtagcacgcgccggttgaatcagatcttcaaacggtttgtagcaccatttactgtagttggagccttgttcagaggcggcgcagctgaacaggatggcgaagaagttatccggatccccgttatcgccagtccagcccatcattaccgtctggtgctcgccatctttcgcacgcttgaggtactcaccccattcgtaggtgacaattttggcctgcacgccgactttcgcccagtctgcctgaatcatctccgccatgcggcgagcgttcgggttatacggacgttgtaccggcatcgcccacaggtcgatggagaaacctttttccagacccgcttctttcagcaaggctttcgctttttcaggatcgtaggtgtagtcctgaacgtcgtcgttatagccccacatggttggcgggatcaggtttttcgcacttacgcccgcgccctgataaaccgctttgatgatcgcgtctttgttcaccgcgtaggtcagagcctggcgaactttcacgtcatcgagtggttttttctgcacgttatagctgagataaccgacgttcagccccggcatttccatcagattgatggatttatcctgcttcatgcgagcgatatctgccgggttcgggtacggcatcacctggcattcattcttctgcaatttcgcgtaacgcacggaagcgtcaggggtaatagagaaaaccagcgtatcgatctgcggtttggtgccccagtagccatcaaacgctttgtagcggatacgggaatctttttgatactgctgtaactggaacggaccggttccgattgggttgaggtccagtttttccggtgtaccggctttcatcatcgcatcagcatattctttactcagaatagaggcgaagtccattgccaggtcagcgaggaacggcgcttccgggcgagtcagcacaaactgaacggtgttgtcgtccacctttttcacttcactgatcagctctggcaagcccatgccttcgaagtattcgtagctgccgccagaaactttatggtacgggttttgcgcgtttttctgacgatcgaagctgaacaccacatcatcggcgttcagttcacgcgtcggtttgaattctttattgtcgtgccacttcacacctttacgcagatggaaggtataggttttaccgtcttcgctgacttcccacttttcagcgaggcccgggatcacttcggtggtgccgattttaaattcaaccagacggttataaagcgggacggaagaggcgtcataggtggtgccggaggtaaacagctgcgggttaaacccttccggagatccttcactgcaataaaccagagttttagcctgaacacttgctgcgacggtcatagccaccaggctgagaccaagcttcagcatcccactctttttcaaggaaatacgcattattctgctccaattgtgatgtttgttgttttaaccctttgcagtgggttgtcgctgcctgaccttttttgttttttgcccggtcgggtcaacgttatgaggtggggatgccgtactaattaacatcagtgtaacagtgcggatcctccataaaatgcccctcgtgacctacaatctgtcaacagaatgtgaaaacgtcaatacagccaaccgggatttacaccaacggtgagaatccacacacaaagattaaaaaaacttcaaacagctatttgcagcagagaaatttgtgctactccaacatgaccagaacaatcagcttaatatttagcaacatttggtgattaagttttatgcatttaatgaaaaaaatctgaggaaaaggtggatatctgagcgattaataccatgaacgctaaaacgcacagcggaaaatgccagggccagccataagtaacgcaaaaaaagatttaagcaaatataaaaaaagacaatggtttctgtcacaaatccgttaatggatagtgagatatggggcgcaaatttggcagggaaatgtgtgtcgtgtaggtcgaataaggcggtcgcgccgcatccgacaatggccggcacatttgcctgatgcgacgctgacgcgtcttatcaggcctacgtcgagtcgaacctccctgcccccggaggttctcatcctcatgagctgcagatgcaaaaaagcctgctcgttgagcaggcttttcgaatttggtcggtgatagaggattactcgccacttcgtggctcgccctgcgggccgttgctggcgcaacgttctctcgcttcgctcgagtcgaacctccctgcccccggaggttctcatcctcatgagctgcagatgcaaaaaagcctgctcgttgagcaggcttttcgaatttggtcggtgatagaggattcgaacctccgaccccttcgtcccgaacgaagtgcgctaccaggctgcgccaatcaccgaatgcggggcgcatcttactgcgcagatacgccctcgtcaatcccttaatagcaaaatgccttttgatcggcgagaaagtcagcaggccgcttagttagccgctgcctcttttgcctgcgggatgtgacaccagttgttgttttcgttaattccaccatccggactagtatagccaagacaacccatgatggtatcgtacagctctacgtgacggcgtggcactttcatgtcggcttcttttttcagctgcgcaaacgcctgcgcattggccggattttccagatatttatcactcatccagaccatcatcggtacgcggaactgctccggcggtgccagttcacgcggcgtgccgtgcaggtgctcgcgttcattaatactctcaccgtggtcagctgcgtagaacacaatcgctttcttatcgcgaacctgatcaatcacgctggagataaagtgatccacataggtcacgctgttgtcataggagttgatcatctgcgctttggtacagccgctatcaacaccaatacattccggcttccactgcgcgaagctacgcggataacgctgggtgtagttaaaatggctacctttggtatgcagaatgatcagatgcttaccatccgggttgcgccctaggctttgctgcatttcgtctaccagcaacatatcatctaccggcttgccacgattacgtggctccgcaccaatctgctcacgataagcaatgttgtccgccatcgtgttgctgtagaaccacatttcgctctgcatagcgtagaggtcagaactgaatcctaactgcttcagaaccgcgaaaatgttctgttcttttaatgtgcgctgcggattatcttccgcgcccccctgacgtacaaacatgcaacgcagactgagtttggttgcggtatcacaggagtaaccacggaacgccgccagatttttctcctgggccagtttcggcgtggtattacgctcatagccgaaaatacccatatggtcccaacgcgtggtttcaccgatgataaacacgacataagtgtcatcaacgttttgcggtgcctgataagtgaatttcttcgccggattaagcaaactattattatcggaagattcatcgacccgcgcccaggcatacagccccaacgcagaaagccagttacttggcagataagagttcgctacgacaccgccataactcggcaaatcaacgccggtcgccctctccactttcttctgctggatatccagcaaacgaatcggtgcccaaaccataatacccgccagtacgacgaccgccaggctgcgaatacgctgccctggggttcgcagttgtcggagcaaggtgtagcgacagcggttattccagataaggataagaggcaatgcactaacggcgattaaccagagaataaagttcagaccaacaacttctttactcaggtcgatatcggtggtcatgacggaagcgatgatgccataaccaatgaccacattaaggaaggtcatgtaatagctggcacctgcggaaaagagcaccaccaggcttgccagaatacgccagctgcggcggccaaacaggctaagaagacgtagtaaaaagaaggtcaccagtacggtggcggccagttcaacaacagcagaaatgcctttccagacggtaaaatcgtgcgcatagctgccgaagcggcggtaaaaaaccgcgccattcataaaaaggccaatatagattgcaagcaaaaagctcagcttctgctgtgtaatgcttttgatgtatctcatgcaaacaaaccctggacaaacaggtgataacaccctgcttagtggcttttcaggcccggcagggaaaaagtgcggaggtagtcagataagtaaaatctacacgcgcgaataagtagaccacagcaaagggaaaaagtgtggggaaagagtgtgcatgaagcacaaatttacaaaaatgcaagtttgaaaagagactttagcgttacaaaaagcagtaaaaagggccagttaattggcccaaattttacgagtcattgtttatacatttcgttgatgcgtttgatgcacacggaagctgaagcccagtagctcgcggctgagcattaaagggagccatgcgcctcacgcaacattttctgctctggctgacgaatcgtcgtagaaagcgccaaactcagaatcagcagggcgaaaatcacgtagaaggtcacatagaagccgccaaacagactggcgataatgctaccacaaatgctaccgataccgaaaccgagataaatcacaccgtagtttttcgccaggttattgaggccaaagaactcactgaccagactcggaaagacggtaatagtgccgccaaagttaaatgccacgcaggcaatcgctgcaaagaacgtcactgcattcaatggtgcaaacagcagggccgccatacccaccaggcttatcacctgaccaatggtaataacacggatacgggcgattttgtcagacagaatacccagcaccagacgaccactaaggttggcgatggaaataacagtgactgcattggctgcggaaaccacatcaaggtgtgccagactttgggcgatatctttcgctaccccaatcacgtacaggccgctcatgcaggcggtcaggaacattaccgctaacatccagtactgcggtttacgcatgctctctgccagcgtgtaatctttctccaccacaccattgctggttttcacttcctgttttggtgcgtctttcattaacgttgcgccgaaaacaatcatcaacagcgcaatcgctccccaaatcacaaaggttttttccagaccgaccgtttccagcagctgcgtgtcgataaatttgaaacccaggctacccagaccataagaaccgatagcgaacgcggagatcagacctttacgctccgggaaccacttcacacagttagagagcgtcagcagataacccgcgccatctgccagtcccaccagcacaccggcgcttaaccacagcatcatcaggttgtcagaatgcgctgtcaggaagaagcctaatcccagcaaaatgccggaagccatggtgacgcgtttaacgccaaaacgttcctgtaatttgcccgcaacagaagagctaattgccagccccagacttaacaagccgaaagagaaagcgacctggcttaccggcgcatccagcttggcggaaagcgcgccattaaacaggctccaggtataaacgctccccagcgcaaactgggtaatgatagtaccgatgagtgtcagccagcgggtacgctgataattactaggtgtcatggcagtattcctgcagtaataaaaaggaaaaatctctgccgacaaccataacgaagtgcactttatgcctggggaaaaacggcatgaaatgccatcagaacggaatgaaatgccttagttcaggaatgaatgacgcgacaattattcaccaaatttattatttggtaagttagcacccactatcgccacaactattgttatttaatggtttcaattgtgactgttacgttaaaatctggcgctaacccccatcgtatacagatagtcgctattattagtggtattttctgcctgagttagcgcggcataggcggcaatattttgattgagcaacatatcagcgcctacggtgacatccagccagttgccgttctggtttgtcgccgtcatccggctcaggccactttgcgccttccagatattctcgccaaattgctggttatagctgatttgcgcccagggtcggagatcgccaagccgggagtcaacacgccagcctaaggtactcacgctggcatgccataacggatcggtcagcgtggtagtactgtcgccaaactcgttatacatgctggtggttgtgccatcgtaatgtaatgccgcgaccgggccggttgtaacctgttcatataaaggaaaattccagcccatactcatactgctggtcacatccacaggggtttcttccgccagattgacttccagtcccagcgccctttggctactttgaatacgttggctcaaaatatcgttgtaatcaggttgatgatcactatcccaggtgtaacgctctgtggaaagtccgggttgcgtatcaacgatatattcttgttgccaggcgtaagctgtgttgagaaaaaaggcactgattaccacgctcgccagcaggcttagctgccagcgaccaccgcttttttttatgatcattaacacgactccagggaagagccgaattcggcaatattattgtcattgtatgaaggatatcgggcatagtagccctgtattaaatattgactttttcaccgatgcgtcaagaaaagcggctgaaatttttacgatcgggtacatagcgagggaaagtatggaacgttgcggctgggtgagtcaggacccgctttatattgcctaccatgataatgagtggggcgtgcctgaaactgacagtaaaaaactgttcgaaatgatctgccttgaagggcagcaggctggattaagctggatcaccgtcctcaaaaaacgcgaaaactatcgcgcctgctttcatcagttcgatccggtgaaggtcgcagcaatgcaggaagaggatgtcgaaagactggtacaggacgccgggattatccgccatcgagggaaaattcaggcaattattggtaatgcgcgggcgtacctgcaaatggaacagaacggcgaaccgtttgtcgactttgtctggagctttgtaaatcatcagccacaggtgacacaagccacaacgttgagcgaaattcccacatctacgtccgcctccgacgccctatctaaggcactgaaaaaacgtggttttaagtttgtcggcaccacaatctgttactcctttatgcaggcatgtgggctggtgaatgatcatgtggttggctgctgttgctatccgggaaataaaccatgattcgggaagcgcaacgtagtgaactccccgcgatcctcgaactgtggctggaaagtacaacctgggggcatccctttataaaagcgaattactggcgtgactgcattccgctggtgcgggatgcctatcttgccaacgcgcaaaactgggtctgggaagaagacggtaagcttctcggttttgtcagcattatggaaggccgatttctggcagcgatgtttgtcgcaccgaaggccgtcaggcgcggtattggtaaggcgctgatgcagtatgtgcagcagcgccatccccacctgatgctggaggtttatcaaaaaaatcaaccggcgataaatttttaccaggcacagggttttcacattgtcgattgcgcatggcaggatgaaacccaactacccacatggattatgagctggccggtggttcaaacgctgtaattaactgctggccggtggttcaaacgctgtaagtgtcagttccggaccgttgtatttttccagccatgccagcgccgtattacccgcacagccattccccagccggctgctggggagatctttggtcagcacgttcactgcgccgtttttacaaataccgtcagcggttaaatccagatccggccatgccccttcgtgaatgcaaatcacgccaggtttaattccctcgctaatgaccgctccggcaagaatttgcccgcgtgcgttccacaaccgaacagtatcgccatcttgtatgccgcgctcctgggcatcgtcaggatgaatggtgacaggctcacgatttgccaccgcgtacaattcgcgcagagaactgtaattcagctggctgtgcaggcggtgcgccggatgggcagaaagtacctgcaactgttctggttcggcattgccctgccattcgtccggctccagccacattggatgcccagggcaatccgggtaaccgtaatcggcaatacgctgactgaagatttcaatcttgccgctggcggtttttaacggatgcgccagcggatcgcggcaaaaatcagcgaagcgaataaaccgctcgctgtccgggttttccggcatctcaattaactggttggcttgccagaactcagcaaatggcggcaattcaacctgctggcttgccccgcgctgtcgggcaacgttataaaacgtttccagccattgcagctcactttttccttccgtaaaacgtgcataaccgcccttctcccagcgttcacttaactcggcaaaaacatcaaaatcattacgcgcttcatagcgtggcggcaccacttgcttcatcggcaccagatgctgattactgtaatcaccggtcatggtgagatcattacgctcaaaagaggtagtcgcaggcagaacgatatccgcgtgttttgccgccgccgtccagaagcattcagagatcaccaccagctccggtttttgccaggcacggatcaggcgattggtatcctgatgatgagtaaagttggcaccgcccgcccaccagataaaacgaatatccgggaaatgtcggttcataccgttgtgttgatatgcgccaccagggttttccagtgcttcaacaatgcgggcaacagggattttatccaccgcatcgcagccacccggcaagctgccctgcatggaagagagcaccgcagaacgccgcgtggggttaccaccattggcaaaatggtaagaaagaccaaaaccgccgccgggtgtgccgatttgccccaacattgctgccagcgtgacgatcatccagtgtttttgctcaccaaactgttggcgctgcattccccagcctgccatcagcatggtggtattttggtggaaaatagccgccagctcgcggattttcgctgcgccaacaccacaaatctctgctgcccattcggcggttttcgctattccgtcactctcgcccagcaaataagaggcgaagacggcataacctgtggtgcaacgcgccagaaacgcttcgtcgtgccaaccattttccaccagcgtatgggcgatccccagcatcagcgcaacatcggtgcccatgtgcggtgccacccactccattttatcgccaaagaaatcgacggtttcgcttcgcattggatcaatgcagatcagctttttcccgctgtcacgcagtgcagaaaagtaagaaagcccctgctcatcggatgcattccacgcaattttcagcgtattgagtgggttagcactccacagcaccacgacatcgctatgttccagcaccagcggccaactggtctgctgttgataaacttcactaccacccacgacatacggcatgatcgcctgtgccgcgccggtgctataatcccccagatgcccggtataaccgcctgccagcgccatatagcgttgtaataatgtgctggccttatgcagcacgccgttactacgccagccgtaggaaccagcaaaaatgcttgccggaccataagcctcacgaatgcgtttatgttgttggtgaataagatccagcgcctcatcccaactcacgcgaacaaattcatcctgcccacgaatgccttgcgggttttccggactcgcaagaaagccttttcgcaccattggaaatcgtacccgcgtattgctgtgaacctggtcgcgaaccgcgctctgcaaggagttttccattcctgtggctaacgcgccacggctgctaaacacggtttcgccgtcggtttcaaccagcatgggcccccaatgggcggcagtcagaacggaatatcgtgaggatgagttggccaaaccgaagactcctgaaaggttagatgtattgagcagttaaatattacttacaaatttccgagtattcccaggaataatcttcatgttcacgcggcataatctcccgccacggaacccgtggcaaagaataaaaaggttattaaggattaacaatgaagaaacgtgtttatcttattgccgccgtagtgagtggcgctctggcggtatctggctgcacaactaacccttacaccggcgaacgcgaagcaggtaaatctgctatcggcgcaggtctgggctctctcgtgggcgcgggtattggtgcgctctcttctagcaagaaagatcgcggtaaaggcgcgctgattggcgcagcagcaggcgcagctctgggcggcggcgttggttattacatggatgtgcaggaagcgaagctgcgcgacaaaatgcgcggcactggtgttagcgtaacccgcagcggggataacattatcctcaatatgccgaacaatgtgaccttcgacagcagcagcgcgaccctgaaaccggcgggcgctaacaccctgaccggcgtggcaatggtactgaaagagtatccgaaaacggcggttaacgtgattggttataccgacagcacgggtggtcacgacctgaacatgcgtctctcccagcaacgtgcggattccgttgccagcgcgttgatcacccagggcgtggacgccagccgcatccgtactcagggccttggcccggctaacccaatcgccagcaacagcaccgcagaaggtaaggcgcaaaaccgccgtgtagaaattaccttaagcccgctgtaatccctttcatgccaggtgatgcagaaatcacctggcattcttcagttttccttcatcatatttcaggctaaggtgatcgccttatcagtgaatggagagaagcatgaagccgtccgttatcctctacaaagccttacctgatgatttactgcaacgcctgcaagagcatttcaccgttcaccaggtggcaaacctcagcccacaaaccgtcgaacaaaatgcagcaatttttgccgaagctgaaggtttactgggtagtaacgagaatgtaaatgccgcattgctggaaaaaatgccgaaactgcgtgccacaagtacgatctccgtcggctatgacaattttgatgtcgatgcgcttaccgcccgaaaaattctgctgatgcacacgccaaccgtattaacagaaaccgtcgccgatacgctgatggcgctggtgttgtctaccgctcgtcgggttgtggaggtagcagaacgggtaaaagcaggcgaatggaccgcgagcataggcccggactggtacggcactgacgttcaccataaaacactgggcattgtcgggatgggacggatcggcatggcgctggcacaacgtgcgcactttggcttcaacatgcccatcctctataacgcgcgccgccaccataaagaagcagaagaacgcttcaacgcccgctactgcgatttggatactctgttacaagagagtgatttcgtttgcctgatcctgccgttaactgatgagacgcatcatctgtttggcgcagaacaattcgccaaaatgaaatcctccgccattttcattaatgccggatgtggcccggtggttgacgaaaatgcactgatcgcagcattgcagaaaggcgaaattcacgctgccgggctggatgtcttcgaacaagagccactgtccgtagatagcccgttgctcagtatggccaacgtcgtcgcagtaccgcatattggatctgccacccatgagacgcgttatggcatggccgcctgtgccgtggataatttgattgatgcgttacaaggaaaggttgagaagaactgtgtgaatccgcacgtcgcggactaagccgcgactgcgtagagtaaagcccgataatcgctcgggcttttactctttattgggttgcagtaactgctgtagtccaggcctgattaaacgcctgatgctgtgccggtaatggcgcaatcagtttgttatattcacttgcctgctgactagtcgggaactggatgccatttgcgacaaagctcacctgagtaccttgctgagcaatgtagtctccaaccatcaccagttgttgcgtgaaagtttgtgccgccggaatcaacggttgcaatgcatcagctggcgtcgttaccactttggtgaatgcctgatcaaagaccggtttcaaatcatcgctctgttttagcgcagagtgcgcagcatcggcctgcaacttcgcattttgcagttgttgcgccagcacacccaggctaccgttcatttcacgcagcggaccgctttgcgtaacgtaatcctgcggtacgcgaattgcgttaacgctgtctacaaccgggcgcagaccggaatccatcgcctgattcacctgctgagaataaccatacagaatcgcgtaatcagagacaaaaggaccaaactgttttttctgatcggcagtcagggttggtagacgttcaccgctacgcatcactgtattctgcaggaagtcgataaacgctttacgctgatcgccttctttatcaaaacacccactcaggctaactaccattaataacgccgcaagaggcgcaaaccagcgagagcaggactttcctgtcgccattttcttactcctttcacccaaaaaaagcgcacaacgacacacgcgtgtctgacgtgacaaggatagtccaggacaggcttgcaggataccctttctacgtaatcttcctggtaaaatcatggagaaaatgaaacaaggttaatttgttgtttcattgttaaaaaatgatagtgccgttgccttttttgtagccagagatttacgccttcgcagaaggttagattttcgaaatctttacaaaacaggagtggtaagagatatatcggcatttatcagatcgttaggtggctataagtcacgctaaatgacaggctgaatcgaatcatagccagagcatgccctgacttcaccccgctgtgtctgcttttcccgactattcttaatgagcttcgatgcaattcacgatcccgcagtgtgatttgaggagttttcaatggaatataaagatccaatgcatgagctgttgagcagcctggaacagattgtttttaaagatgaaacgcagaaaattaccctgacgcacagaacaacgtcctgtaccgaaattgagcagttacgaaaagggacaggattaaaaatcgatgatttcgcccgggttttgggcgtaagtgtcgccatggtaaaggaatgggaatccagacgcgtgaagcctagtagtgccgaactaaaattgatgcgtttgattcaagccaacccggcattaagtaagcagttgatggaataaacttttatccactttattgctgtttacggtcctgatgacaggaccgttttccaaccgattaatcataaatatgaaaaataattgttgcatcacccgccaatgcgtggcttaatgcacatcaacggtttgacgtacagaccattaaagcagtgtagtaaggcaagtcccttcaagagttatcgttgatacccctcgtagtgcacattcctttaacgcttcaaaatctgtaaagcacgccatatcgccgaaaggcacacttaattattaaaggtaatacactatgtccggtaaaatgactggtatcgtaaaatggttcaacgctgacaaaggcttcggcttcatcactcctgacgatggctctaaagatgtgttcgtacacttctctgctatccagaacgatggttacaaatctctggacgaaggtcagaaagtgtccttcaccatcgaaagcggcgctaaaggcccggcagctggtaacgtaaccagcctgtaatctctgcttaaaagcacagaatctaagatccctgccatttggcggggatttttttatttgttttcaggaaataaataatcgatcgcgtaataaaatctattattatttttgtgaagaataaatttgggtgcaatgagaatgcgcaacgccgtaagtaaggcgggaataatttcccgccgaagactcttactctttcaatttgcaggctaaaaacgccgccagctcataactctcctgtttaatatgcaattcacacagtgaatctcttatcatccgggtgaaaaataaaagcgtgaaacaaatcactattaaagaaagtaatctatatttctgcgcattcccagcctcctgtgttgatttccaacgagtataactttgatttatagtcaggtggggcttttctctgtctgcctttcggtgaatacctgagacaaacagtctcaagcacccgtggctattctagcttaataagtttgtttcttctccttgatataatcctaaaaaaatctcataaaattaatatatgagataatctttattcagcagaagattattaaaggttgctgtattatttagcgataaaaaaagcctgccagatggcaggctatttaataacggcgttattattgcaacaggctaatatccgcaacgcgcaggaacagttcgcgcagtttctccagcatggtcagacggttgatacgcaattctttgtcatcaaccatgaccatcactttatcgaagaaagcatcaaccggttcacgcagctcagccagttcgaccagcgcatcctggtaacgaccttccgtaaagtacggctccagcttgtcacgtagcaccacaacctgcatcgccagtttaatttcttccggctctttcagggtagaggcattcacgcggtcgctcagcacttcgtcagatttcgccagaatgttagatacacgtttgttcgccgccgccagtgcagcagctgcatccagggtacggaaatggcttaccgctttcatacgggcatcgaaatcagccggacgagtcggacgacgcgccagtaccgcctggatggtgtcaacggtataaccttcgtcctgataccaggcgcggaagcgaccgagcataaagtcgataacatcatcaactacgttggcattagtcagcttatcgccatacagacgcaccgcttcttcggtcagcgtttgcagatcaaggttgaggttcttctcaacgataattcgcagcacgccaagcgcggcacgacgcagcgcaaacgggtctttgtcgcctttcggatgctgaccgataccgaagatacccgccagggtatccatcttgtcagcaatcgccagcgcacaagctactgggttggacggcaggtcatcaccagcaaaacgcggctgatactgctcattcagcgccaccgcgacatcttccgcttcgccatcgtgacgcgcatagtgcatccccataacgccctgggtgtcggtgaactcgaagaccatgttggtcatcaggtcgcacttagacagcagacccgcacgggtagcgtggttaacgtcagcgccaatctgttcagcaatccagccagccagcgcctggatgcggtcagttttgtcgcgcagcgtccccaactgttgctggaacaacacggtttgcaggcgcggcaggttatcttcaagacgttttttacggtcggtgttgaagaagaactcggcatccgccagacgcggacgaacgactttctcgttaccggagataatctgctgcggatctttgctttcgatgttggcaacgaagataaagttcggcagcagtttgccgtcgttcgcatacaccgggaagtatttctggtcacctttcatggtgtaaaccagcgcttcagccggcaccgcgaggaatttctcttcgaattttgcggtcagaacgaccggccactccaccaggctagccacttcttccagcaggctttcgcttaagtcagcgttaccgccaatcttacgcgctgcttcttcggcatcggctttaatcttcgccttacgttcttcgtaatcggcgatgactttcccacgctcacgcagaatttccggatactgatcggcgttatcgatggtgaattccggctcgcccataaagcggtggccgcgaatcacgcgatcggactgaatgcccagaatggttgccggaatgactttgtcgcccagcagcagggtcacggtgtgcaccggacgcacgaagtgcacgtcgcttgcgccccaacgcatcagtttcgggatcggcagtttcgccagagaagtcgcaaccatattcggcagcagtgcttcggtgctttcgcccttcacatgggcgcgatacagcagccattcgcctttatcggtagtcagacgctcagcctggtcaacggtaataccgcaaccacgcgcccaaccttctgccgctttgctcggtttgccttcagcgtcgaacgcctgggcaatcgccgggccgcgtttttcgatttcacgatccggttgcgcttccgccaggttagctactttcagcgccagacgacgcggagcagcaaaccattgaacggtgccgtgtgcgaggccagcgctatccagctccgcagtaaagttcgcagcaaaggactcagccaggctgcgcagtgcttttggtggcagctcttcagtgccgatttccaccagaaaagttttctcagacatagccgcctcttacttatctttgttgcacatcgggaagccgagggcttcacgggaagcgtagtatgcttctgccactgctttggtcagggtgcgaatgcgcagaatgtagcgctgacgctcggtgacggagatggctttacgcgcatccagcaggttgaagctgtgggcggctttcagaatacgctcgtaggctggcagcggcagcggattttccagcgccagcagctgctgcgcttctttctcgtactgctcgaagcaggtgaacaggaagtccacatccgcgtattcgaagttgtaagtggactgctccacttcgttctgatggaacacgtcgccgtaggtggttttacccagcgggccgtcgctccagaccaggtcgtaaacgctgtctacgccctgaatgtacatggccagacgttccagaccgtaggtgatctcgccggtaaccggtttacactccagaccaccaacctgctggaagtaagtgaactgcgtcacttccatgccgttcagccacacttcccagcccagtccccaggcacccagcgtcgggttttcccagttatcttccacgaaacggatgtcgtgaatagtcgggtccatgcccagctctttcagagaaccgaggtacagctcctgaatattgtccgggcttggcttaatgaccacctggaactgatagtagtgctgtaaacggttggggttttcgccgtagcgaccatcggtcgggcgacgagaaggctgaacataagcagccgccatcggttctggccccagctcgcgcagacaggtcattgggtgagaggttcccgcgccgacttccatgtccaatggttgaacaatggtgcagccctggcgagcccagtaatcctgtaaggtcaggaacaagccctggaaggtcctggtatcaaacttttgcatattatttcgtgctggatacgtgtggatttaaaggaagggatcagtatacccgctggatggaagatatacagtacgaaacgggaaaaagcagggcttaacgcatggaaagatgcaaaaaatggccatccgcgtcaaaagaacagacaaactgctctttacggaaggtataaccgcgcatttcatagcttccctggaactgttcgaaggcggtgacgtcgattttttgctcgccggtgttataacgttttgccgcctgatccttgcataacgcttccatattcaagctacgcagaggatcaacctttacccgttgtgctttctgcacgggactcggtatagaacaacccactagcaccataagcgccattgccggaaagaaagcgttcatcatcattaaattaccgtctggtttgcaggtgagtcttattatttatatcggtatagtggctgatatcttacgaatttccttaagcctctataagctgtagtgataaaactcagattattccagtgcgccaaccaaatgatttatcggtcagactttttttaaccagatacagagacacagatgcagcccaaaatttactggattgataacctgcgagggatagcgtgtttaatggtggtgatgattcacaccactacctggtatgtgaccaatgctcatagtgttagccccgtcacatgggatatcgccaatgttctgaattctgcctctcgtgtcagcgtgccgctatttttcatgatttccggctatctcttttttggcgaacgcagcgcccagccgcgccatttcttgcgtatcggcttatgtctgattttttatagcgcaatcgcactgctctacattgcgctgtttacctccatcaatatggagttagcgctgaaaaacctgctgcaaaagccagtgttttaccacttgtggtttttcttcgcgattgcggtgatttatctggttagtccgctgattcaggtgaagaacgtcggcggaaaaatgttgctggtgctaatggcggtgattggcattatcgctaacccaaacacagtgccgcagaaaattgacggttttgaatggctgccaattaacttatatatcaatggcgatactttttactacattctgtatggcatgttgggccgcgctatagggatgatggacacacagcataaagcactgagctgggtgagcgccgcgctgtttgcgacgggggtttttattatctctcgcgggacattatatgaattgcagtggcgcggaaattttgccgatacctggtatctttactgtgggccgatggtttttatctgcgcaatcgcgctattgactctggttaaaaacacgctggatacgcgtaccattcgcggacttggcttaatctcccgccatagtttgggtatatacggattccacgccttgattatccatgcgctgcgcacccggggaattgagcttaaaaattggccaatactggatattatttggatcttttgcgcgacgttggcagcgagtttgttactttctatgctggtacaacgaatcgacagaaacagattagtgagttaagtaaaagcccggtcacattggactgaccgggcttacgtgagttattcgctgtattcttcctgggtaacctgtgtttcttttggtgggtttattccggcatcacgaatatttttctgcaccgctactgcaccaaacaagcttaagaagaaagccagtccataaaaacctttttcgctgagtaataatgtcgcattccacagacctaccatcagtaatgcaacagagataataaagacagtcaggcaggtcatataataaatggaagtggtcggtatgccttcatacttgtcccgaacggtcttttgataagacgccgcagaaaacagtcctaataccagtacggcaaaataatatcctttttcatttaactgcatctctgcattccatagccctaacagataggtaacgataccaccaacgagagctatccaactcacaatactaaaggccggactataggtacttattttgttgtccatcacagtattcctttcattcctgaatatgtaagagctttatgttgctcatgcgctgcgaaacaaacgcatttgaccaaacaagcagacaaaaaaggcgatgggatagatcaccatttcataagtattgataggtgcgtttaaaacaccgataaacaagagaccgatagtgattaacgcaactaactggcagatatgggtaaaaaaatcatccagttgcccgagtttttctgcgcgaagatatgcatagttgccaaaagttgctgtcattaacacgccaagaaaatagccttttccacttaacaatgggcaactgatccatagcccaaccagataaaccagcgccccgacaacaaataatagtttcgccacagtcttactggttttcataacgatctccatatctaccagcgatacattacgagtaaccaacgaaagacaaaactgaaaaatgccattaacaaatgattttcagaataaattcatactaaatattaattaattactgagatatatagatgtgaattatcccccacccggtcaggcaggggataacgtttacgccattaatggcagaagttgctgatagaggcgacggaacgtttctcgtcgtggctgataagcggcataacgctgcgcatctggtagatggctctgttctaacggtagttgcggcaacaattcaatgaggcttttctctggattcgccgcgatctgcgccagccttgctgcgcccagtgctggccccacatccccccccgtacggtaatcgagctgctgaccgctgatatccgccagcatctgacgccagtactcactacgcgccccgcccccaatcaacgtaacactttgcggtttaataccgcaggcatgcacgacatccatgccatctgccagcgcataacccacgccttccagcactgctcgcgccagttcattggggccatgttgatgagtcaaaccaaagaaaacccccttcgcctggggattattgtgtggcgtacgctcgccggaaagataaggcagaaaccaaactggctcggcactttcatcagcctgttgagctgcagcgattaaagctgggacattgctcaggccggttaatttcgcggcccaatccagacagctcgctgcactcagcatcacagacattaaatgccaacgttgcggtagcgcatggcaaaagctatgtacggcgctttctggcttgcttaagaacccttcgctgacagcaaaatagaccccgctcgtccccaggcttaacattgcctgattagcatcaaccattcccacaccaactgcaccagctgcattgtcgccaccgcctgcgacaactggcaccgtcgccataccccacgctttcgcaacttcaggtaacaaagcaccagtaatttcgctgccttcgtataatgcgggcatctggtcacgagataagtcgcaagcctgcagcatgacgtcactccagtcacgctttgcgacatccagccacatggtgccagctgcgtcagacatatcgctggcaaactcccccgtcatacgcagacgcaagtaatctttcggtaataatactttgtcgatttgacggaatatctccggctcatgccgctgaacccatagcaatttaggcgcagtaaatccgggcatcatcaggttgccggtaatcacccggctttgcggaactcgcgcttccagcaaagtgcactcttgcgcacagcgcccgtcgttccacaaaatggcagggcgtaacacccgttgctgagcatccagcaaggttgctccgtgcatctggccggcaatacccaatgctttaacgtcctgcagagaatgctgatcgcccagagctttcattgcgcgatcagttgcctgccaccactgttccgggtcttgttcgctccagagtggatgcgggcggctaacggtcagcttttccgtttgcgcagcaaccacctcaccctgctcgttgagcaaaataacttttacgccgctggtgccaagatctatcccgatatacatatcgatcgttccttaaaaaaatgcccggtatcgctaccgataaccgggccaacggactgcacagttagccgttatttgtcgaacagataatggtttaccagattttccagttgttcctggcgaccactctgatgcaccggagacaaatgatgttcctgagcatatttggctaaatctgccagactcatttggcctttcaggatttgctggcccaattcgctattccagccggaataacgctgcgcgatgcgtttatccagctcgccatcttcaatcatgcgcgctgcaattttcagcgccagtgccatcgtatccatcgcgccgatatgaccgtaaaacagatcatatttatcagtactttgacgacgtactttggcatcgaagttcagaccaccggtggtgaaaccgcctgctttgagaatttcatacatcaccagcgcattctcttccacactgttcgggaactggtcggtgtcccagcccagttgcgcatcgccacggttggcgtcgacagaaccgaacaggccaagcgcaatggcggtggctatttcatgatggaaagagtgacctgccagcgtcgcgtggttagcttcaatgttcagtttaatctctttttccagaccaaactgtttcaggaagccatagaccgtcgcggcatcgtaatcatattgatgtttggtcggttcttgcggtttcggttcgataagcaacgtgccctggaaaccgattttatgtttatgctcaaccaccatctgcataaagcggcccagttgttcacgctcctgacgcaagtcggtatttaacagcgtttcgtaaccttcacgaccgccccacaggacatagttttcaccgcccaatttatgggttgcttccatcgctgtaacaacttgcgttgccgcccagctgaagacttcaggatctgggttcgtcgccgcacccgcgccgtagcgagggtttgtaaagcagttggccgttccccacagcagcttcacgccgctctcttcttgcttgcctgccaggacatcaaccatttgcgcaaaattattgatgtactcttttaagctcgcgccctcaggggaaacatccacatcgtggaagcaataaaatggcacatgtaacttgtggaaaaactcaaatgcgacatctgctttacgcttcgccaacgccagtgcctcaccaggctgctgccacggacgattaaacgcccccacaccaaacatatccgccccgttccagcagaaggtgtgccagtagcaggcggcaaaacgcaagtgctcttccatacgcttacccaacaccagttcgtcgggattgtagtgacggaatgctaacgggttactggatttactgccttcataacgaacgcgatcgagctggtcaaaataggcttgcatattgaactccataatcaggtaatgccgcgggtgatggatgatgtcgtaatattgggcactccctttcagttgctcaattatgttatttcacactgctattgagataattcacaagtgtgcgctcgctcgcaaaataaaatggaatgatgaaactgggtaattcctcgaagagaaaaatgcaataagtacaattgcgcaacaaaagtaagatctcggtcataaatcaagaaataaaccaaaaatcgtaatcgaaagataaaaatctgtaattgttttcccctgtttagttgctaaaaattggttacgtttatcgcggtgattgttacttattaaaactgtcctctaactacagaaggccctacaccatgaaaataaagaacattctactcaccctttgcaccagtctcctgcttaccaacgttgctgcacacgccaaagaagtcaaaataggtatggcgattgatgatctccgtcttgaacgctggcaaaaagatcgagatatctttgtgaaaaaggcagaatctctcggcgcgaaagtatttgtacagtctgcaaatggcaatgaagaaacacaaatgagccagattgaaaacatgataaaccggggtgtcgatgttcttgtcattattccgtataacggtcaggtattaagtagcgttgtaaaagaagccaaacaagaaggcattaaagtattagcttacgaccgtatgattaacgatgcggatatcgatttttatatttctttcgataacgaaaaagtcggtgaactgcaggcaaaagccctggtcgatattgttccgcaaggtaattacttcctgatgggcggcagcccggtagataacaacgccaagctgttccgcgccggacaaatgaaagtgttaaaaccttacgttgattccggaaaaattaaagtcgttggtgaccaatgggttgatggctggttaccggaaaacgcattgaaaattatggaaaacgcgctaaccgccaataataacaaaattgatgctgtagttgccagtaacgatgccaccgcaggtggggcaattcaggcattaagcgcgcaaggtttaagtgggaaagtagcaatctccggccaggatgcggatctcgcaggtattaaacgtattgctgccggtacgcaaactatgacggtgtataaacctattacgttgttggcaaatactgccgcagaaattgccgttgagttgggcaatggtcaggaaccaaaagcagataccacactgaataatggcctgaaagatgtcccctcccgcctcctgacaccgatcgatgtgaataaaaacaacatcaaagatacggtaattaaagacggattccacaaagagagcgagctgtaagcgttacgccccagcgcggagcgggggcgtgatttctctccatgccgcgtgaatgaattggcttaggtggagtcgttatgccttatctacttgaaatgaagaacattaccaaaaccttcggcagtgtgaaggcgattgataacgtctgcttgcggttgaatgctggcgaaatcgtcagtctttgtggggaaaatgggtctggtaaaagtacgctgatgaaagtgctgtgtggtatttatccccatggctcctacgaaggcgaaattatttttgcgggagaagagattcaggcgagtcacatccgcgataccgaacgcaaaggtatcgccatcattcatcaggaattggccctggtgaaagaattgaccgtgctggaaaatatcttcctgggtaacgaaataacccacaatggcattatggattatgacctgatgacgctacgctgtcagaagctgctcgcacaggtcagtttatccattagtcctgatacccgcgttggcgatttagggcttgggcaacaacaactggttgaaattgccaaggcacttaataaacaggtgcgcttgttaattctcgatgaaccgacagccagtttaactgagcaggaaacgagcattttactggatattattcgcgatctacaacagcacggtatcgcctgtatttatattagccacaaactcaacgaagtcaaagcgatttccgatacgatttgcgttattcgcgacggacagcacattggtacgcgtgatgctgccggaatgagtgaagacgatattatcaccatgatggtcgggcgagagttaaccgcgctttaccctaatgaaccacataccaccggagatgaaatattacgtattgaacatctgacggcatggcatccggttaatcgtcatattaaacgagttaatgatgtcagcttttccctgaaacgtggcgaaatattgggtattgccggactcgttggtgccggacgtaccgagaccattcagtgcctgtttggtgtgtggcccggacaatgggaaggaaaaatttatattgatggcaaacaggtagatattcgtaactgtcagcaagccatcgcccaggggattgcgatggtccccgaagacagaaagcgcgacggcatcgttccggtaatggcggttggtaaaaatattaccctcgccgcactcaataaatttaccggtggcattagccagcttgatgacgcggcagagcaaaaatgtattctggaaagtatccagcaactcaaagttaaaacgagctcccccgaccttgctattggacgtttgagcggcggcaatcagcaaaaagcgatcctcgctcgctgtctgttacttaacccgcgcattctcattcttgatgaacccaccaggggtatcgatattggcgcgaaatacgagatctacaaattaattaaccaactcgtccagcagggtattgccgttattgtcatctcttccgaattacctgaagtgctcggccttagcgatcgtgtactggtgatgcatgaagggaaactaaaagccaacctgataaatcataacctgactcaggagcaggtgatggaagccgcattgaggagcgaacatcatgtcgaaaagcaatccgtctgaataacgcattgaggagcgaacatcatgagcaaaagcaatccgtctgaagtgaaattggccgtaccgacatccggtggcttctccgggctgaaaagtctgaatttgcaggtcttcgtgatgattgcagctatcatcgcaatcatgctgttctttacctggaccaccgatggtgcctacttaagcgcccgtaacgtctccaacctgttacgccagaccgcgattaccggcatcctcgcggtaggaatggtgttcgtcataatttctgctgaaatcgacctttccgtcggcagtatgatggggctgttaggtggcgtcgcggcgatttgtgacgtctggttaggctggcctttgccacttaccatcattgtgacgctggttctgggactgcttctcggtgcctggaacggatggtgggtcgcgtaccgtaaagtccctagttttattgtcaccctcgcgggcatgttggcatttcgcggcatactcattggcatcaccaacggcacgactgtatcccccaccagcgccgcgatgagtcaaattgggcaaagctatctccccgccagtaccggcttcatcattggcgcgcttggcttaatggcttttgttggttggcaatggcgcggaagaatgcgccgtcaggctttgggtttacagtctccggcctctaccgcagtagtcggtcgccaggctttaaccgctatcatcgtattaggcgcaatctggctgttgaatgattaccgtggcgttcccactcctgttctgctgctgacgttgctgttactcggcggaatgtttatggcaacgcggacggcatttggacgacgcatttatgccatcggcggcaatctggaagcagcacgtctctccgggattaacgttgaacgcaccaaacttgccgtgttcgcgattaacggattaatggtagccatcgccggattaatccttagttctcgacttggcgctggtagtccttctgcgggaaatatcgccgaactggacgcaattgcagcatgcgtgattggcggcaccagcctggctggcggtgtgggaagcgttgccggagcagtaatgggggcatttatcatggctagtctggataacggcatgagtatgatggatgtaccgaccttctggcagtatatcgttaaaggtgcgattctgttgctggcagtatggatggactccgcaaccaaacgccgttcttgattttgataaaaattttctcaaagccggttacgtattaccggttttgagtttttgcatgattcagcaggaaaagaaccatgtttactaaacgtcaccgcatcacattactgttcaatgccaataaagcctatgaccggcaggtagtagaaggcgtaggggaatatttacaggcgagtcaaagcgaatgggatattttcattgaagaagatttccgcgcccgcattgataaaatcaaggactggttaggagatggcgtcattgccgacttcgacgacaaacagatcgagcaagcgctggctgatgtcgacgtccccattgttggggttggcggcagctatcaccttgcagaaagttacccacccgttcattacattgccaccgataactatgcgctggttgaaagcgcatttttgcatttaaaagagaaaggcgttaaccgctttgctttttatggtcttccggaaagtagcggcaaacgttgggccactgagcgcgaatatgcatttcgtcagcttgtcgccgaagaaaagtatcgcggagtggtttatcaggggttagaaaccgcgccagagaactggcaacacgcgcaaaatcggctggcagactggctacaaacgctaccaccgcaaaccgggattattgccgttactgacgcccgagcgcggcatattctgcaagtatgtgaacatctacatattcccgtaccggaaaaattatgcgtgattggcatcgataacgaagaactgacccgctatctgagccgtgtcgccctttctagcgtcgctcagggcgcgcggcaaatgggctatcaggcggcaaaactgttgcatcgattattagataaagaagaaatgccgctacagcgaattttggtcccaccagttcgcgtcattgaacggcgcagtacagattatcgcagcctgaccgatcccgccgttattcaggccatgcattacattcgtaatcacgcctgtaaagggattaaagtggatcaggtactggatgcggtcgggatcagccgctccaatcttgagaagcgttttaaagaagaggtgggtgaaaccatccatgccatgattcatgccgagaagctggagaaagcgcgcagtctgctgattagtaccaccttgagcatcaatgagataagccaaatgtgcggttatccaagcctgcaatatttctactctgtttttaaaaaagcatatgacacgacgccaaaagagtatcgcgatgtaaatagcgaggtcatgttgtaacgatgatgagaattgtcggcgtcacatcaggtaacgctgcgtggttgtcggatgcggcgtgaacgccttatccgacctacccgccaggcatgataaaacgcaccaacaacgcttcaggctcgtagctcaactgcctgagacaaagtaaaaagccttatccgactgacaagtcggataaggctcaaggaaatgcaattacatatgcgccgcgattaaccgttggttatcctggtacattgcgaacaggtagttgttataactcttccctttggtgctgtagcccttcagcttgtgaatcatcgctgtggcagtcacttcctgatccgctttacgcagctgcgcacggcttttacggaagctagagtaagccgggtgcgtattcaggttagtgacataggcgctcacgctttctttgacagaactaaactgactgtaccctttcactttacctggcgcattggtacaacgtcctttcatgcatttcatgccgaacaggttgttgttgttgcgcgccagcttgctcgttccccaaccgctttctgctgcagccatcgtcgccaccatactggtggggataatgtctacgcgttcaagcaaggtattccacgggatttttcgcgtattaccggaccacttcaccttgtagcgtttggcgatgtctttcagacgcgcacgctcagcaggactccattggccctgatactgtttactaatgagccagttacgttccgcagtaatggccgcattttggctggtaatgtaaggcattacggtccggagaaacgcctttttccttggtgttccggaagggtattttcgcaaatcaggaagactactactctttgcactattgcgagaatactcttgtttactgcttacctgtttattactagctttagttaagtgggacttttgactcgctgttgttgtgtgcgtcttcgctaacacctcactgctaaacaccagagtgagtaacataagaatcatcgccccatatcgtcgtatgggagtcaaaatcatcaggtctcctggtcggatttaatcattccaacaccttatatttttcacaaatttgagagttgaatctcaaatcatatcaaaaatagctgtcaagagcaccccaaggaatagtccaaatctgaaactatgtcacgtgttaacgattcagattggcgctaaatcgcagaaaatgtgggggttatcgcaaaattcagccgttttttgcgcgagatcgctcacccttgcttctcatcctgtggacttaccgctcagggatgagttttgtttggcttatcgctggcaaactgtctgaaatcgcagcaataaggactcatccgccatgaaactcgccgcctgttttctgacactccttcctggcttcgccgttgccgccagctggacttctccggggtttcccgcctttagcgaacaggggacaggaacatttgtcagccacgcgcagttgcccaaaggtacgcgtccactaacgctaaattttgaccaacagtgctggcagcctgcggatgcgataaaactcaatcagatgctttccctgcaaccttgtagcaacacgccgcctcaatggcgattgttcagggacggcgaatatacgctgcaaatagacacccgctccggtacgccaacattgatgatttccatccagaacgccgccgaaccggtagcaagcctggtccgtgaatgcccgaaatgggatggattaccgctcacagtggatgtcagcgccactttcccggaaggagccgccgtacgggattattacagccagcaaattgcgatagtgaagaacggtcaaataatgttacaacccgctgccaccagcaacggtttactcctgctggaacgggcagaaactgacacatccgcccctttcgactggcataacgccacggtttactttgtgctgacagatcgtttcgaaaacggcgatcccagtaatgaccagagttacggacgtcataaagacggtatggcggaaattggcacttttcacggcggcgatttacgcggcctgaccaacaaactggattacctccagcagttgggcgttaatgctttatggataagcgccccatttgagcaaattcacggctgggtcggcggcggtacaaaaggcgatttcccgcattatgcctaccacggttattacacacaggactggacgaatcttgatgccaatatgggcaacgaagccgatctacggacgctggttgatagcgcacatcagcgcggtattcgtattctctttgatgtcgtgatgaaccacaccggctatgccacgctggcggatatgcaggagtatcagtttggcgcgttatatctttctggtgacgaagtgaaaaaaagcctgggtgaacgctggagcgactggaaacctgccgccgggcaaacctggcatagctttaacgattacattaatttcagcgacaaaacaggctgggataaatggtggggaaaaaactggatcagaacggatatcggcgattacgacaatcctggattcgacgatctcactatgagcctagcctttttgccggatatcaaaaccgaaagtactaccgcttctggtctgccggtgttctataaaaacaaaatggatacccacgccaaagccattgacggctatacgccgcgcgattacttaacccactggttaagtcagtgggtccgcgactatgggattgatggttttcgggtcgataccgccaaacatgttgagttgcccgcctggcagcaactgaaaaccgaagccagcgccgcgcttcgcgaatggaaaaaagctaaccccgacaaagcattagatgacaaacctttctggatgaccggtgaagcctggggccacggcgtgatgcaaagtgactactatcgccacggcttcgatgcgatgatcaatttcgattatcaggagcaggcggcgaaagcagtcgactgtctggcgcagatggatacgacctggcagcaaatggcggagaaattgcagggtttcaacgtgttgagctacctcagcagccatgatacccgcctgttccgtgaagggggcgacaaagcagcagagttattactattagcgccaggcgcggtacaaatcttttatggtgatgaatccagccgtccgttcggtcctacaggttctgatccgctgcaaggtacacgtagcgatatgaactggcaggatgttagcggtaaatctgccgccagcgtcgcgcactggcagaaaatcagccagttccgcgcccgccatcccgcaattggcgcgggcaaacaaacgacacttttgctgaagcagggctacggctttgttcgtgagcatggcgacgataaagtgctggtcgtctgggcagggcaacagtaacttttccggcttcccgttcgtcagtacctcgggaagccgccaaccaggataaaatgtcagccctaatcagcgttgcaggataaagcaccgctcactcttcaacagaccgatttgcaccccagcaaatgtagcgttattgttaccttccttgctacagagttcgacagatatcccgctatgacattctccctttttggtgacaaatttacccgccactccggcattacgctgttgatggaagatctgaacgacggtttacgcacgcctggcgcgattatgctcggcggcggtaatccggcgcagatcccggaaatgcaggactacttccagacgctactgaccgacatgctggaaagtggcaaagcgactgatgcactgtgtaactacgacggtccacaggggaaaacggagctactcacactgcttgccggaatgctgcgcgagaagttgggttgggatatcgaaccacagaatattgcactaacaaacggcagccagagcgcgtttttctacttatttaacctgtttgccggacgccgtgccgatggtcgggtcaaaaaagtgctgttcccgcttgcaccggaatacattggctatgctgacgccggactggaagaagatctgtttgtctctgcgcgtccgaatattgaactgctgccggaaggccagtttaaataccacgtcgattttgagcatctgcatattggcgaagaaaccgggatgatttgcgtctcccggccgacgaatccaacaggcaatgtgattactgacgaagagttgctgaagcttgacgcgctggcgaatcaacacggcattccgctggtgattgataacgcttatggcgtcccgttcccgggtatcatcttcagtgaagcgcgcccgctatggaatccgaatatcgtgctgtgcatgagtctttccaagctgggtctacctggctcccgctgcggcattatcatcgccaatgaaaaaatcatcaccgccatcaccaatatgaacggcattatcagcctggcacctggcggtattggtccggcgatgatgtgtgaaatgattaagcgtaacgatctgctgcgcctgtctgaaacagtcatcaaaccgttttactaccagcgtgttcaggaaactatcgccatcattcgccgctatttaccggaaaatcgctgcctgattcataaaccggaaggagccattttcctctggctatggtttaaggatttgcccattacgaccaagcagctctatcagcgcctgaaagcacgcggcgtgctgatggtgccggggcacaacttcttcccagggctggataaaccgtggccgcatacgcatcaatgtatgcgcatgaactacgtaccagagccggagaaaattgaggcgggggtgaagattctggcggaagagatagaaagagcctgggctgaaagtcactaaaaattgcctgatgcgctacgcttatcaggcctacatgatttctgcaatatattgaatttggaagaatttgtaggccggataaggcgtttacgccgcatctggcataaacaaagcgcactgttccggcgttgagaaacgccggaaaacgtttcaaacaggctgctgccgtagccgatgccgctgcactttctcgacatccatgcactgcaacgcctttgtcgggcaggcttcaacacaggccggtcccgtctcccgatgccagcacagatcgcacttaatcgccctcgcctttttgcggctagaaacgacctccatcgcaccaaacgggcaagccagcatacagcttttacagccaatgcaacgtgtttgttcaacgaaaatatgcccatgttcgcggcttatcgcgtcaacagggcagacattcgcgcacggtgcatcttcacactgatgacaggctactgccgtggtccagcagtggtctttaatgacgaatacgggaaataaacacacgaatacgggaaataaactcgtctggactcaacgcagcgcaatcctgattctcatgatggctcactgcgcaagccacttcacaggtacggcaaccgatacatttcgtcgcatccgcaataataaaccggttcatgatcactcctttgcactaaaacagcagagtgccagagagcgcgtccctactgctttgatccaacgaaggaaatgttaaagttttggcacttgtccaaagcgttatgtgatcgcgcccaggtcatccctgacagtaaatcccagttcattagaaatagcctgcgcggtttcacgcagtggtttcaggagatttttctctcccacctgtttcagacgacttgtgctaaggctaatgctcacggcgtacggcacccgcccatgaatatcaaacaccggaacagcaatacaggagacgccgagttcgttttcttctctgtccatcgccgctccgctttcacgaatgtgcgccagttcgtcgaacatcgcgggcagctcggtaatggtattgcgggttaacggctggatctcatgctgatggctttcccagtaactcttcacgtagtccgggtgaccaaacgccatgtagatcttgcccattgcggaacagtagagcggcatatgctggccaatataggcacgggttcgcagcatcccggttgtgggttccagcttataaatcaaaatagcgtgatcgtcttcgcggctggagaagttaatggtttcaccagtggcgatgttcagtgcctcaagatgcggagcggcgatatgaatgatattcaggctagacagcgccttctgcccgacggcaataaatttggtggtcaggcgataactccctgcggcaggcgcggtggtcacatagccgcaggactgtaatccctgcaataagcgatggacggtactcttatttaaaccagccagctcgctaagatgcgccaacggacaaccgtttggatagttgctcaaaatctcaatcagcatcaacccgcgaaacagactctggcttccggctggacgctctttttcctgcgccatctcgttctctttttttcccatcacttctttccccattttgtcgcgtcctgatggtagcgcaaagtgtgccgtagttcacgatctcgacagataatttataaccaattgatttttatgtcttttgaaattcatcaatcagattgccttgttaaaaagtgatcgatatatttgaaatcaagtttcgcatattgaaattttaagccaaaaaagcgatcaaaaaaacaaggaagcctgggatgaaagtgacatttgagcagttaaaagcagcctttaatcgggtcttaattagtcgcggcgttgacagcgaaacggctgacgcctgtgcagagatgttcgcccgcaccaccgaatccggcgtttattctcacggcgttaatcgtttccctcgtttcattcaacaactggaaaacggcgatatcattcctgatgcccaacccaaacgtataaccagcctcggcgcaattgaacagtgggacgcccagcgtagcatcggtaacctgacagcgaaaaagatgatggatcgcgccattgaactggctgccgatcacggtattggtctggtggcactacgtaatgccaaccactggatgcgcggcggcagctacggctggcaggcggcggaaaaaggctatattggcatttgctggaccaactccatcgccgtaatgccgccgtggggcgcaaaagagtgtcgcataggcactaacccgctgatcgtcgccattccttccacgccgatcaccatggtcgatatgagcatgagcatgttctcttacggcatgttagaagttaaccgtctggcaggtcgtcagctcccggtcgatggtggctttgatgatgagggcaatttgaccaaagaacctggcgttatcgagaagaatcgccgcattttgccgatgggctactggaaaggttctggcatgagcattgtgctggatatgatcgctactctcctttccgacggcgcatccgttgccgaagtcacccaggacaacagcgacgaatacggcattagtcaaatttttattgccattgaagtggacaagcttatcgacggtcccacccgcgatgccaagctgcaacgcatcatggattacgttactagtgccgagcgtgctgacgaaaatcaggccattcgcttacccggccatgaatttactaccctgctggccgaaaaccgccgtaacggcatcactgttgatgacagcgtgtgggccaaaatccaggcgttatgaggagataagtcatgatttttggacatatcgcgcagcccaatccgtgccgtttgcccgccgccattgaaaaggcgctcgattttctgcgcgctaccgatttcaacgccctggagccgggcgttgtcgaaatcgacggcaaaaatatttatacgcaaattatcgatttaaccacacgcgaagcggtggtaaaccgtccggaagtgcatcgtcggtatatcgatattcagtttctggcgtggggcgaagagaaaatcggcattgctattgatacgggaaataataaagtcagcgaaagtctattagagcagcgcaatattattttttatcacgacagtgaacatgaaagttttatagaaatgataccgggcagctacgcaattttctttccgcaggatgttcaccgaccaggttgtattatgcaaacagcctctgagatacgaaaaattgtggttaaagtcgcattaacggcgctgaattaatcgaataatcgtctacgccagaacgcctgggtaatgttattgctctaactatattaataattcaggttgctgcacatgcgacttgaattatgacagacatagcctcaaggaatagctatgaaaaaaatactcgaagcaatactggcgattaatctcgccgtactttcctgtattgtatttataaacattattttaagatatggttttcagacaagcattttatctgttgatgaattgagtcgttatttatttgtctggttaacgtttattggcgcgattgtagcttttatggataacgcccacgttcaggtcacctttctggtggagaaactctcccccgcatggcagcgacgagtcgctctggttacccattccttaatcttatttatttgtggcgcactggcctggggcgcaacgctaaaaacaattcaggactggagcgattatagtccgatcctcggtttacccatcggcctgatgtatgccgcttgtctgcccaccagcctcgttatcgcattctttgaactgcgtcatttatatcaactcatcacgcgtagcaattctctaacgagcccaccgcaaggagcttaatcatggctgtgctgatttttctgggctgtctgttgggtggtattgctatcggtttgcctattgcctgggcactgttgttgtgcggggcggcgttaatgttctggctggacatgtttgatgtccagatcatggcacaaacgctggtgaacggagccgatagcttctccctgctggcgattccgttctttgtgctggcgggtgaaatcatgaatgcgggcggcttgagtaaacgcattgttgacctgccgatgaaactggtggggcataaaccaggcgggctgggctacgtcggcgtgctggcagctatgattatggcgagcctttctggttctgccgttgcggataccgccgccgttgccgctctactggtgccgatgatgcgcagcgccaactatccggtcaaccgggcggcggggctgattgcctctggcggcattatcgcgccaattattcccccttccattccgtttattatcttcggcgtttccagcggattatccatcagtaagctgtttatggcgggcattgcccctggcatgatgatgggcgcaacgctgatgcttacctggtggtggcaggccagtcgccttaatttaccccgccagcaaaaagcaacgatgcaggaaatctggcactcttttgtctccggtatctgggcgctgtttcttccagtcatcattattggcgggtttcgctccggcctgtttacccctaccgaagccggggccgttgctgctttctatgcgctgtttgtcgccacagttatttaccgtgaaatgaccttcgccacactttggcatgtactcattggcgcggcgaaaaccaccagtgtggttatgtttctggtggccagcgcacaagtttccgcctggctgattaccattgctgaactgccgatgatggtttctgatttactgcaaccgttggtcgatagtccgcgtctgctgtttatcgtcattatggtggctatcctgattgtcggcatggtcatggatttaacgccgacggtattaattcttaccccggtattaatgcctttagttaaagaggcaggaatcgatccgatttatttcggtgtcatgtttatcattaactgcagtatcggcttaattacaccgcctatcggtaatgtacttaacgttattagtggggtggcaaaactcaaattcgatgatgcagtcagaggcgttttcccttacgtcctggttttatatagtttattagtcgtatttgtttttattcccgatctcatcatcctccctttgaaatggattaattaaaaggaaaatattatgaaattacgctctgtaacctacgcattattcattgctggcctggctgcattcagcacatcttctctggcggcacaatctttacgtttcggttatgaaacaagtcaaaccgacagccaacatattgcggcgaaaaaattcaatgatttattgcaggagagaaccaaaggcgagctgaaattaaaactgttcccggacagcactctcggtaacgcgcaggcgatgatcagcggcgtacgtggcggcaccatcgatatggaaatgtccggcagcaataactttgccgggttaagtccagtgatgaacttgcttgatgtccctttcctgttccgcgataccgctcacgcgcataaaacgctcgacggcaaagtcggtgatgatctgaaagccagtcttgaaggtaaaggactgaaagtactggcctactgggaaaacggctggcgcgatgtcaccaacagccgcgcaccggttaaaacccccgccgacctgaaagggctgaaaatccgcaccaacaatagcccgatgaatatcgccgcattcaaagtctttggcgctaacccgatcccgatgccgtttgccgaagtctataccgggctggaaacccgcactatcgacgctcaggaacacccgatcaacgtcgtctggagtgcaaaatttttcgaagtgcagaagttcctttctctgacgcaccacgcctattccccgcttctggtggtgatcaacaaagcgaagtttgatggcttaagtccggagttccagcaggcgctagttagttctgcacaagaagcgggtaactatcagcgcaaactggttgctgaagatcagcaaaaaatcatcgacggcatgaaagaagcgggcgtggaagtcatcaccgatctcgaccgcaaagcctttagcgacgcactggggaatcaggttcgcgacatgtttgttaaagatgtgccgcagggagctgatctgctgaaagccgtggatgaggtgcaataaaccatgacgcaatactggctggggttagattgtggcggtagctggctgaaagccgggctgtatgaccgcgaaggccgggaggcaggcgtgcagcgcctgccgctgtgcgcattaagcccgcagccaggctgggcagagcgcgatatggcagaactgtggcaatgctgcatggctgtcattcgcgccctgcttactcattctggtgttagcggggaacaaattgtcggtatcggcatctccgcacagggaaagggcttgtttttgctggataaaaacgacaaaccgctcgggaatgctattttgtccagcgaccgccgggcgatggaaatcgttcgtcgctggcaggaagatggcatcccggaaaaactctacccgctgacccgacaaaccttgtggaccgggcatccggtgagcctgttacgctggctgaaagagcacgaaccagaacgctacgcgcaaattggctgcgtgatgatgacgcacgactacctgcgctggtgtttaactggcgtcaaaggctgtgaagagagcaatatttccgagtccaacctctacaacatgagtcttggggaatatgacccgtgcctcaccgactggctggggatcgctgaaatcaatcacgccctgccgcctgttgtcggatctgccgaaatctgcggggagatcaccgctcagacagccgccctgaccggtctgaaagcgggtacgcccgttgttggcggcctgtttgatgtggtttccaccgcactctgcgccgggatcgaagacgaatttaccctcaatgcggtgatggggacctgggcggtgaccagcggcataacccgcggtttacgtgacggtgaagcgcatccgtatgtctatggtcgctacgttaacgatggtgaatttatcgttcacgaagccagccctacctcttccggcaacctcgaatggtttaccgcacagtggggagaaatcagctttgatgagatcaatcaggccgttgccagcttgccgaaggctgggggcgatctctttttcctgccgttcctgtacggcagcaacgccggactcgagatgaccagtggtttctacgggatgcaggccattcacacccgcgcgcacctgttgcaggccatctatgaaggggtggtgttcagccatatgacccacctcaaccgaatgcgcgaacgttttactgatgttcacaccctacgcgtcactggcggcccggcgcactccgatgtctggatgcaaatgctggcggacgtcagcggtctgcgtatcgagctgccgcaggtggaagaaaccggctgctttggtgcggcccttgccgcccgcgtcggcaccggggtttatcacaacttcagcgaagcccaacgtgacttgcgacacccggtgcgcaccctgctgccagatatgaccgcccatcagctttaccaaaaaaaatatcaacgttatcagcatctcattgccgcacttcagggctttcacgcccgcattaaggagcacacattatgagccgaccacttctgcaactggccctcgaccacagtagtcttgaagccgcgcagcgcgacgtgacgctgttaaaagacagcgtcgatatcgtcgaagcgggcaccattctctgtttaaacgaagggcttggcgcggtgaaagccttgcgcgaacagtgcccggacaaaatcatcgttgctgactggaaggtcgccgacgctggtgaaacgctcgcgcaacaggcgtttggcgcaggcgctaactggatgaccatcatctgcgccgcgccgctcgcgacggtagaaaaaggccacgcaatggcacaacgctgcgggggtgaaattcagatagagctgttcggtaactggacgctggacgacgcccgcgactggcatcgtattggcgtgcggcaggccatttatcatcgcggtcgtgatgcacaggccagcgggcaacagtggggcgaagccgatctggcacgcatgaaggcgcttagtgatatcggccttgagctttccattactggcgggattacccctgctgacctgccgctgtttaaagatatccgcgtgaaagcgtttattgccgggcgggcactggcaggcgcggcaaatccggcgcaagtggctggcgatttccatgcgcaaatcgacgctatctggggaggtgcgcgtgcgtaatcatcagttagggatttatgaaaaagcgctggcgaaagatctctcctggccggagcggctggtgctggcaaaaagctgcggttttgattttgtcgaaatgagcgtggatgaaaccgacgaacggctcagtcgtcttgactggagcgccgcacaaaggactagcctggttgccgcgatgatcgaaacaggtgttgggatcccgagcatgtgcctgtccgcacatcgtcgctttccctttggtagccgtgacgaggcagtgcgcgaacgggcgcgggaaatcatgagtaaagcgattcgcctggcgcgcgatctcggcattcgcaccatccagctggcaggttatgacgtctattacgaagaccacgacgaaggcacccggcaacgttttgctgaagggctggcgtgggcagtcgaacaggcggcggcaagtcaagtaatgctggcggtggagattatggataccgcgtttatgaactccatcagcaaatggaaaaaatgggacgagatgctcgccagtccgtggttcaccgtctacccggacgtcggcaacctcagcgcctggggcaatgatgttcccgccgaactgaaactgggcattgaccgtatcgccgcgatccacctgaaagacacccagccagtcaccgggcaaagtcccggacagttccgcgacgtgccgtttggcgaaggctgcgtcgatttcgttggcatcttcaaaacgctgcataaactgaactatcgcggttctttcctgattgagatgtggaccgaaaaagccaaagagccggtgctggagattattcaggcgcggcgttggattgaagcgcgtatgcaggaggctggatttatatgttaacgtaaatgcaggaggctggatttatatgttagagcaactgaaagccgacgtgctggcggcgaatctggcgcttcccgctcaccatctggtgacgttcacctggggcaatgtcagcgcggtagacgaaacgcggcaatggatggtaatcaaaccttccggcgtcgagtacgacgtgatgaccgccgacgatatggtggtggttgagatagccagcggtaaggtggtggaaggcagcaaaaaaccctcttccgatacaccaacgcatctggcgctctaccgtcgctatgccgaaattggcggtattgtgcatacccacagccgccacgccaccatctggagtcaggccgggctggatctccccgcctggggcaccacccacgccgattatttttacggtgccatcccctgcacgcgacagatgaccgcagaggagattaacggcgaatatgaatatcagaccggcgaagtgatcattgaaaccttcgaagaacgtggcaggagtccggcacaaatcccggcggtgctggtgcattctcacggcccgttcgcatggggtaaaaacgccgccgatgccgtgcataacgccgtagtactcgaagaatgcgcctatatgggtctattcagccgccagcttgcgccgcagctccctgcgatgcaaaacgaactgctggataagcactacctgcgtaagcatggggccaatgcctattacgggcagtaatccctcacgccggggcttcatcgccccggcactacgaattgatatgttccttgctgtaacgccgcttccacgctgctggcgttaaaccagtatgtttctgaaaaatctgccggaaatagccaacgtcattaaaccgtattgcatggagcaggccgacaacgtcgagtcactgcataacctgttgctgcccgccgatgcgccatttacgacatttgaaggcaagggattgttcagccataagatcctgattcagacgccaggttcccggtatgaacagagcaatccagagcaacaacctttgtggcattacgacggagcaccagccgcaccgacatccaccggtgaattaaaaacgccagctcaccccggtgacaaaggtaaaactctcattacgatcaatcatcgggctgtcggtaatctcttccggcagctcgctgtatcctgcgctcgccatcaatacgacgtgctctcctatcgggtattttgccgtcaggctgacatagggcacccaggcatcctgcgcggaataacttgccagaccgctacgacgggactcactctcactaatgccatagtaatagtcactgaaattctcgtcataatagagaacgcccagcgcaggtgtcaggctcagacgacctatccgcattttgtggaatacgcttagctcccccacccagccgttgctgttatccagaacgtccgcagctgcagaggctttcacggttccccaacgctcgtggtgataccaggcaacccccgccatagccgtactatcacgcttatcaagctgttgcatggcataatcgtcattatcggtagggtcaaattccagcggcatccaggatgcggtcaggctaagttcatttttttcactttggctcagaataaaacctaacgtggtctgacgaacataaaaagtatcaccttcataactaatcagcggaattgccttcgtattttcattataaccgcgataagggctttcattataagccgcaccagcaccaatggataattcagaagcagttgcgcttgccataaaaggcaacgcaaataacgccacaatattgcgattaattaacatgtccggtattccattttaaaataagataaaaaagagtcggcataataatgcttacaatttctccggtgcaagattcatatttatatagtaatatataaaattatatataattgggctgttgcgatgacaaaattacaacttaagtaccgggagttaaaaattatcagcgtaatcgctgccagtgaaaatatcagccatgccgcgactgtacttggcatcgcacaggccaacgtcagcaaatatcttgctgattttgaaagtaaagtgggtttaaaagtccttgaccgaaccacccggcagctgatgctcacaccttttggcaccgcgctgttaccgtacatcaacgacatgctggacagaaacgagcaacttaataattttattgcagattataagcatgagaaacgtggtcgggtcaccatctacgccccaaccggcataattacctatttatccaaacatgtaatcgataaaattaaagatatcggtgatatcaccttaagcctaaaaacctgcaatcttgagcgtaatgccttttatgaaggcgtcgaatttcctgatgattgtgatgttttaatcagctacgctccaccaaaagatgaaagcctggttgccagttttattacccaatatgccgtaaccgcttatgccagccagcgctatcttgagaaacatcccattagccgtcctgacgaactcgaacatcactcctgtattttgatcgacagcatgatgatcgacgacgcgaatatctggcgcttcaacgtcgccgggagtaaagaggtgcgggattatcgcgtgaagggaaattacgtttgcgacaacacgcaatctgcgctggagctggcacgaaatcacctggggattgtgtttgcgccagacaaaagtgtgcagagcgacctgcaagacggcacgctggtgccctgctttcagcaaccctatgaatggtggctggatctggtggctatcttccgtaaacgggaataccagccctggcgggtccagtatgtgctggatgaaatgctgcgtgaaattcgccaccagcttgctcagagccagcaactgcggcctgaacaagcggcggaaagcgaagattaatgatcgagataaaggtaatgcacccagctggtcatgcgtaatagcactttgcgcatcacgctgacatggctgaaatgatcagagtaaaccgccacctgggcgtaaataccgtctggtaaagcgctcaaatcagtgtgctcatccagttcaatggtcgcgataacgccatcactacccggcgctgtgtttaacgtctgtaaggtgccggtgctctgataagctccgccgggaacggctggactaatggctgccagcttaccgctgaataccttacctggcagagcattaaacaccacttccgcatcgtcgccaggagccagtcgcagcaaggagttctgacggaactgcgccacgatttgtcgtttctgatcgggtataaacaccatcaccggacgtagcggcaggctcgcggcataggtacccggacgaatcagtacctgggtcacataaccatcgctcggcgcacgcactatcgtctgctcaaggttatattttgcttccgcgagctgtgctttcaggctggcgatttgagaatgttcacccaacaccaggctatccagctggctctggatctgtttttgttccgccgcgctactcttcacggaggcttcctgcgccagataattttgccgcgccacatcgatatcgcgttcactaaacgggtttactttcgcctggctgccacgtgcgtaacgctgatactctttagcgaatttatcccgcgtggcctttgcctgctgagtattcgccgccatctcatctaactctgcgcccaacgcccgctgtttatgttctgcggtaacgatatccgccatcagccgatccacccgcgcctgataacgcgtcgggtccagtcgaaatagcacctcaccttttttaatcagcgtatttttcttatccgtcacttcaatcaccacaccagtcacctgtgggacaacaggaatagaaataaccgctttttgcgctttaaaggtatacggatggttatagttcattaacagaattagaccgctgacaataaatattccacccagggccgctgtgggaatggtccatttatttacgggaattttgaagatcttaaacattgcccatgcaaaagccacataggtcaaaataatcagtaaatccataagtattactcggcagaagaggatttgatgtcggcgagctgtttctccagcccggcaatgcgctgttgcagttgcataacggaactatcatggctttgcattccccatccccgctccgggcggtaaagcgtggcccaaatccacaaaaacggccagataacatgtaacgtaaaaagactcacccaaccagcaacatgaatggcgtcggcatgaggatgattacgttttttggcaatcaggtagggaatatcatgtaaaataatgatcccatagaagatcaccagaaatacaaaaataagcactcccagtgcaaaatagtccaggaacatatttccctcaaagaatataaaaaagaacaattaacgcatattatgaaatgccatgatgcagtgcaatttccttatttatataacgacatattgttttttatatactttcttaaatgtgctgtctggtttttcaacaggacgaggtttatcatattgaaatagtggaactattggccaaactaatgaataactccagtaaaacatccacagtacagattaagcgtattaaaccttcaattatctaccgtttattgctgattggcctcggatcaccaatggtgatttacggcctggttcgcccgctcaccatcgaaacgcgagattaaactcctgacaaaacacgccccagaaacgtacttctgttggcgtagtctgggttattgcgcacgtaggtttaaaacgtaaattgtaacaacgtgcgctttgtttatgccggatgcggcgtgtacgccttatccggcctacggtcaggttcccgtaggcatgataagacgcgtaagcgtcgcatcaggcaatgaatacccaatgcgaccagcttcttatatcagaacagccccaacggtttatcgctgtagctcaccagcaggcacttggtttgctggtaatgctccagcatcatcttgtgggtttcgcgaccgataccactttgtttgtagccaccaaacgccgcatgtgccgggtaagcgtgataacagttggtccacacgcgcccagcctgtatgccgcgccccatcttataggccagattaccgttgcggctccagacgcccgcgcccaggccatattgcgtatcgttcgccagctccagcgcttcttccatcgttttgaaggtggtcaccgccagcaccgggccaaaaatctcctcctggaacacccgcatattgttctgaccaaacagaatcgtcggttcgaggtagtagccgtctttcagttcaccttccagcagcttgcgccgcccgcctgtgagcacgtcagcgccctcttttttaccgatatcaatgtagttgaggatggtttccagttgcccgtgagaaacctgcgcgcccatttgcgtcacgctgtcgagcgggttaccgctacgaatgctttcgacacggcggatggcgcgttccataaagcgttcgtagatagattcctgcactaaagcacgactcggacaggtgcaaacttcgccctggttaaaggcaaacagtgcaaagccttccagcgctttatcgaaaaaggcatcttcttcatccatcacatcagcaaagaagatatttgggctcttaccgcccaactccagcgtcaccggaataatgttttgcgttgcgtattgcataatttgttggcccacttccgtactgccggtaaacgccactttggcgatgcgtttgctggtcgccagatattcgccaattaccccacctgcgccattgaccacgttcaccacgcccggcggcagtaaatcaccgacaatttccattagcagcagtacagaaagcggggtaagacgtgcgggtttcagcaccacacagttgcccgccgccagcgcgggagccattttccagctcgccatcagcagcgggaagttccacgggataatctgccccaccacgcctaacggttcatggaaatgataggccacggtttcgctatcaacttcactgatcccaccttcctgcgcccgaatacagctggcgaaatagcggaaatggtcaatcgccagcggtacatccgcagcactggtttcgcgaatgggtttgccgttatcccaggtttcagctgtcgctaacagctcgaggttttgttccattcgatcggcaatcttaaacagaatcgccgcacgatcctgcacgctggtgtgcgcccatttatctttcactttgtgcgcagcatccagcgccagatcgatgtctcgtttgccgctagacgccacttcgcacagcagctgcccggtcaccggcgtcagattctggtaatactcgccgtcggcaggggctacccattcgccgccaataaagttgtcatagcgggcttttaacttgagggggaaaccatactcgccgggcttaatctgtgcactagggggattattggtcatgatcgtctccttgcggtgtgaggtataacaagggtagacgtgactggcgaaatcttcgccagtcggtaacagctttacgacagctatcacgaatttacgggcaagggttacagagatagttgaaaaagcggctaacaatttgccagccgttgtggaaatgatgattacatcgctgcgcgataaatcgccacaatttcttcgtgagttgcctggatcgggttagtaaagccacaggcatctttcagggcattagtcgccaataccgcgaaatcttcttctttcacgttcaggtcgcgtaggcctgccgggatatccactttcttcgccagttcacggatggcgttaatgcaggcttcagcaccttccgcgtcgtttttacctgtcacgttcacgcccattgcagcggcacagtcacgcagacgtgcagcggcgactttgctgttgaatacctgaacgtgcggcagcaaaacggcgttacatacaccgtgtggcaggttgtagaaaccgcccagctggtgcgccatcgcatgaacataacccagagaagcattattgaacgccataccggcgaggaactgggcataagccattgcttcacgcgctttcgcattactgccatcttcaacggctaacggcaggttttcggcaatcatggtcacggctttcagtgcacaagcgtcagtgatcggcgtggcggcaatagaaacatatgcttcgatagcgtgcgttaaggcatccatacccgttgcggcggtcagactcttcggcataccaatcatcagagaggagtcattgacagaaagcagcggagtgacatgtttatcaacaatcgccattttgatatgacgcgcttcgtcagtgatgatgcagaaacgggtcatttcagaggccgtacccgccgtggtattgatggcgatcatcggcagctgcggttttgcagagcggtcaacgccttcgtaatcgcgaatatcgccgccattggctgccaccagcgcaataccttttgcgcagtcgtgtggagaaccaccgcctaaggagatcacgctatcgcaattattctctttaagtaatttcaaacctgcggcgacgttttccgtggtggggttaggttgggtgccatcataaataacgctaaaaatattgcgttcttccagtgctttttgcacatcgcccgccatacctaatttcgttaacatattgtcagtgacaattaaggtacgggtaaatccataatctgccatcatattcattgcatcagtcaaactatcagcgccgatgacattcacagaaggaataaagaacgtactagctgccataacacactcctgaaagtgtaaaaaagggcgggcagcttactgaggattttcattcgaaaatatgatcagtattattgattatcaaaattaatctaataaaaagcacattgtattcattaaacaatgtgctttttttaaattcataagaattttgtattaatttattttaaaacttaattaatcatttccttatttttccggaaataataatgcgtcgcgcaataaatgatcatttccacgacgacgcgtaaagccaatgcggtcaaaatattccagaatctgaattgccagctttcggcctacgcctaagcgatcgcggaaatccgccgcgcaggtactaccacactcctgatcgagatcgcggatcatattggcaaactcgacaatccgatcgttacggtaataacgatctttaacgatcgcggtaattattccttgctgcgccgcctggcgtagagtcaggcgcattgcctgctcgtcggttcccgtctcttttgccaggtcacgcacccaccacggttcgtcaccaaacagtggctctgctttttgccagatggcctgctgctcttcgctgaagcccgctttgtgatctggcagatgcagccagccgtgatggctgtggatgtcgccgctttcgcgcatcttttcaatcagcaacagtaccagcgcttcatcttccattggcaacgccatacgtcgcagacgttcgcgcccagggccaggttcatcgcgatgttgctcatgataagtcgctaatgtgtcgagaattttccgctgccagcgggcggcaaccggcgcattcaacaagctataaccagcctgaatataaccaggctgttgcagcaattcgcgcatcccttcgccgttgagctggcgcgcccaggcgaaatccgcaaggttaaccgcgccgcgttccagatgaacagataacgcatcggcatcgctctgcgcccgtgcaagagacgccagccattgcagatattccggcttacgtttaccgcgacgcggcgggttaagcatcacgacgcgcgctccggccagcgtgttgcgggcagagatatcgcgcaataccaggcggtcgttatctgccagccataacggggtgtcgaagaccagttcagcaaggttatcttccagcagactaacgcgtcccgtgacgtggctggcggcgtggtgaatatgcagcggctgccactgggtcagcggtgtatgggtttgaagctcgacaatcacccgtgtgaacggctctggcggcacatcggcaagcagccagtcgccacggttaatctgctctttttccgcatcacccgcgatgttaagcgcgatacgctgcccggcattggcggtttctgttggctggttttgcgcatgcagcgcacgtacacgcatcggtttatttacaccagtcagccagagactatcgcctaccttcacttccccgcttaacgccgtaccggtgacgaccagcccggcaccttttacggtaaatgcgcggtcaatcgcgaggcggaaactatgttggctggcgtgctcgcgttccggcaactgaagcagatgctcgcgcagggcatccattccccgaccttcggttgctgcggtgataaacagttttgcctcagcaaaaccgtattcccgcagaacctcctttacctggcgttcaacctcatcaacacgcgcttcgtccacgcgatcggctttggtcagcgccactgtcagcatcgggttaccggtcagctgcaaaatcgccagatgctcacgggtctgtgccatcacgccgtcatcgcacgccaccaccaacagcgcgtgatcgataccaccaacgcccgccagcatgttggaaagaaacttttcatgaccgggaacgtcgataaaaccaggcacgcgaccatccggctgcggccagtaggcatagccgagatcgatggtcatgccgcgctttttttcttccggcagacggtcagcatttacgccagtaatcgcctgcaataaggttgttttgccgtggtcaacgtgtccggcagtcgcaataatcatttcaacaacatctccaaaaaccgttgctcatcttcaaggcagcgtaaatccagccacaatcgtccgtcataaatacgaccaatcaccggcactggcaattcacgccagcgggcggctaaactctcaaggtggctaccgcgtccatcatggggtgtaaacgttaatgccgcgctcggcaggcgatcaaccggcaggctaccactgccaatctggctaagacatggcataacctgtaccgcaaactccgcgccgtaatgtgcggcaaggggggcctgtaaacgttgtgcctggatttgaatgacctctgcgctgcgggtaagcaggcgcagggtcggtaatttttcactcagagcttcagggtgtaaataaagacgcaacgtggcttccagcgccgcgagggtcattttatccgcgcgtaatgcacgcttcagcgggtggctttgcaggcgggcgatcatctcttttttaccaacaataattcctgcctgcggcccgcctaacaacttgtcgccggagaaactcaccagactgacgcccgccgcaatcaactcctgcggcattggctctttcggcaaaccgtactggctaagatcgaccaggctgccactgcctaaatcagtcactacgggaacatccagctctttgccgagcgccaccagttccgcttcatctatcgctttggtgaacccctgaatgctgtagttactggtatgtactttcatcaacagtgcggtattttcattcaccgcctgacgataatcattcgcgtgcgtgcggttggtggtccctacttcgtgtagggtgcagcctgcctgacgcataacatcgggaatacgaaacgcgccgccaatctccaccagttcgccgcgagataccaccacctcttttccgctggcagtggccgccaacatcaataacaccgccgccgcattgttattgacgatacaggcatcttccgcccccgtaatacggcacagcagctgcgccagcgcccgatcgcgatgtccgcgtccggcgtcgtccagatcatactcgagggtcactgggctacgcatagcctgcgcaacggcttccaccgcggcttccgcctgtaaagctcgcccaaggttggtatgcagcacggttcccgtcaggttgatcaccggacgcagcgcgctctgcgcttctttcgtcaaccgggcatcgacttcttgcgcccagttttcacaccacgcaggcagcgtctggctgccacgaatcacttctcgcgcttcgtcgagcatctgacgcaacaattccaccacgcgggtgtgaccataagtatcacgcaaagaaaggaaggagctatcgcgcaataagcgatcaatagccggaagttgactatagagggaacgcgtttcggttgtcataggaaacctggctgatcaaggccctctcacacggagaagggcgtttaacataaccacggattgtaacgtgagatgggtcaggaggacatatcgcgcatcaagcctttggcggttcggtgcgagcaaaactttcgcggctaaacaggttttcgaccagtttgactaagtgtgggcggtcgacacaccaacctggcgcaacgcggcggaaattgagatatccgacggcacaggcaatggcgatagtcgccagattgaccgtatcggttttgagtgtgccatcgaccagatatccttccagcacatccagactgcggttgattttctcccgctggcgtaacaattcatcttcagactgctgcgccgctggacgcgcctgttcacgcacgcttaccagcccggcatccataatgccatccgccagtgcctcaattttgcgcacccgcaagctctccagcggatcgcgcggcaacatcgccggagcgacattcattaattcaatatattcagcgatgatcgggctatcaaaccagcattcgccctcttcggtcaccagcaccggcacttttcctaacgggttaaattgcgccacgccgttgtccgcgttatagggcagttcattaataaattcgaaagttatgcccttttctaacaacagaatagaaagtttgcgtacaaacgggctggtgtagctaccgacgagtttcatgccgagtcctttgtgcgaggaaaaatatcagtatggctcaatgatccaaataaagataatgcatccagctggtcattcttagcagcactttccgcatcacgctaacatggctgaaatggtcggagtaaaccgccacctgggcgtagatgccgtcgggtaaggcatcgatatcatcgttagggtccagttcaatggttcccagcacaccgtccgtgccgggcacgaccgttaaactttgcaataccccctgcgcctgataagaaccgcctggcacgacaggtaaaatactagtcagtttgccgtgaaacacctgcccaggtagcgcgttaaacaccacttccgcatcatcgccaggtttcagacgtaacaggctgttttgccgaaattgggcgacaatttgccgtttttgctcggggatgaagaccatcaccggacgcagcggcaaggcagctgcgtatgtacctgggcggatcagtacctgagtaacgtagccattgctcggcgcgcgaatgacagtctgctcaaggttatattttgcttcagtaagttgcgctcttaagctcacaatctggctttgctcgccgttaaccatactgtcgagctggctctggatctgcgcctgctccgccacgctgcctttcaccagcgcatcctgcgcgaggaaattttgccgcgcatcgtcgatgtcacgttcgctgaacggattcaccgccgcctggctgcctttcaagtaacgttgataatttttaaacagacggtcgcgctccgcactaacctgggtggtgttggcctgcgcttcagtgagctgcgcacgcagcgtctttatattatgcgtcgccgtcatcaggtcagcctgaagtctgtcaactcgcgcctggtaacgaaccgggtcgagcttaaaaagcacctcgcccttttgaataagctgattattcttgtcagtgacttcagtaacaattcccgtcacctgtggcgtgatagggatcgctatcactgccttttgcgcggtaaaagtgtaagggtggttgtagttcatcaacaaaatcaaaccactcaccagaaacacgcctcccagcgccgccgtcgccagcgtccactgatttaccggaatgcggaagattttaaagaccgcccacgccagcgccacgtaagttaaaacaatcaatagatccataattagatctccgggaacgtggaatagtcagtctttttctcggcggcgagttgatgctccaaccgggaaattcggtcagaaagtgcggcgatttccgggtcagtcgctttctcctggctcgcaacatgactctgcataccccagccacgctccggttgatagagcgtcgcccagatccacagaaacggccagataacatgcagagtaaacaggctcacccagcccgccgtatgaatagcgtcggcatggggatggttgcgctttttggcaatcagataagggatgtcatgtatcgcgatgattccataaaaaatcaccagaaagacgaagatcagcactcccaacgcgaaatagtttagaaacatatctgcctcggattcacgtttatcagtgttgtttttgggctggcagccagaagggagtcaggctgatattttgacaataatccgggttcgcgattctcgccataacaccaaagaataatttttagaggtgatgagttgcttagttacataacgattgtatgacgaaggcataacatgctgtagatcacatcaggtgaacgccgtaagaaaatatcttgtgattcagatcacaaagattcaacaaaccatcaaaacaaaaatgtgacactactcacatttaaatgccatttttagcgaaaatcgccgccttgttgcttttttacacaagcgttttgtgatgaacgtcacgtcaattacctctctaccccctatatttatgtgattgatatcacacaaaaggccgtcgactggacagttaaccgattcagtgccagatttcgcagtatctacaaggtccggctacctctgccgccacattaacaaaaaacctcgggcttccagcctgcgcgacagcaaacataagaaggggtgtttttatgagttccgatattaagatcaaagtgcaaagctttggtcgtttcctcagcaacatggtgatgccaaatatcggcgcgtttatcgcgtggggtatcatcaccgcgttatttattccaacagggtggttaccgaacgagacgctggcgaagctggtcgggccgatgatcacttatctcctgccgctgctgatcggttataccggtggtaagctggtaggcggcgaacgtggcggcgtagtcggtgccatcaccaccatgggcgttatcgtcggcgcagacatgccgatgttcctcggttctatgattgcaggtccgctgggcggctggtgcattaagcacttcgaccgctgggtagacggtaagatcaaatccggttttgagatgctggtgaataacttctccgcaggcatcatcgggatgatcctcgctattctggcattcctcggcattggcccgattgttgaagccctgtccaaaatgctggctgcgggcgttaacttcatggttgtccatgacatgctgccgctggcgtctatctttgttgaaccggcgaaaatcctgttcctcaacaacgccattaaccacggtatcttcagcccgctgggtattcagcagtcccatgaactgggtaaaagtatcttcttcctgattgaagctaacccaggtccaggtatgggcgtgctgctggcgtacatgttctttggtcgtggtagcgctaaacagtctgcgggcggtgcggcaatcatccacttcctggggggtatccacgaaatctacttcccgtatgtgctgatgaatccgcgtctgatcctcgcagtcatcctcggcggtatgactggcgtgttcacgctgactatcctgggcggtggtctggtttctccggcatctccgggttctatccttgctgtactggcgatgacaccaaaaggtgcttacttcgctaacatcgcgggtgtgtgtgcggcgatggctgtctccttcgttgtctctgctattttgctgaaaaccagcaaagtgaaagaagaagatgatattgaagcagcaactcgtcgtatgcaggacatgaaagctgagtctaaaggcgcatctccgctgtctgctggcgatgtgactaacgacctgagccacgtacgtaaaatcatcgttgcctgtgacgccggtatgggttccagtgcgatgggcgcaggcgttctgcgtaagaaaattcaggatgcaggtctgagccagatttctgttactaacagcgcgatcaacaacctgccgccagatgtggacctcgtcatcactcaccgtgacctgaccgaacgcgctatgcgccaggttccgcaggcacagcatattagcctgaccaacttcctcgacagcggcctgtacaccagcctgaccgaacgtctggttgctgcccaacgccacacggcaaacgaagagaaagtaaaagacagcctgaaagacagctttgacgattccagtgctaacctgttcaagctaggcgcggagaacatcttcctcggtcgcaaagcggcaaccaaagaagaagcgattcgttttgctggcgagcagctggtgaaaggcggttacgttgagccggaatacgttcaggcgatgctggatcgtgaaaaactgaccccgacttatctgggtgagtctatcgcggtgccacacggtacggttgaagcgaaagatcgcgtactgaaaacgggcgtcgtgttctgccagtacccggaaggcgtgcgcttcggtgaagaagaagatgacattgcccgtctggtgattggtattgctgcccgtaacaacgagcacattcaggttatcaccagcctgaccaatgcactggatgatgagtccgtcatcgagcgtctggcacacaccaccagcgtggatgaagtgctggaactgctggcaggtcgtaagtaatccaatcccaccctctccacatggagaaggtggggttaattgcctgatgcgctacgcttatcaggcctacaggatgcatcacaatttgttgaatttgcacgttcttgtaggccggataaggcgcttacgccgcatccggcgctgcccctctcctcacggagagggtttgggtgagggaaaagcctcaccccagccctctcgggtaaaaacattgatgaaggttaatactatgaaagcattacattttggcgcaggtaatatcggtcgtggctttatcggtaaactgctggcagacgcgggtatccaactgacgtttgccgatgtcaatcaggtggtacttgatgccctgaatgcccgtcatagctatcaggtacatgtggttggtgaaaccgagcaggtagataccgtttccggcgtcaatgctgtcagcagcattggtgatgatgtcgttgatctgattgctcaggttgatttagtcactaccgccgttggcccggttgtgctggaacgtattgctccggcaatcgccaaagggcaggtgaaacgtaaagaacaaggtaatgaatccccgctgaacatcatcgcctgtgaaaacatggtacgcggtaccacgcagctgaaaggccatgtgatgaacgccctgccggaagacgccaaagcgtgggtagaagaacacgttggctttgtcgattccgccgttgaccgcatcgtaccgcctagcgctagcgcaactaacgatccgctggaagtgacggtagaaaccttcagcgaatggattgtcgataaaacgcagttcaaaggcgcactgccgaacatcccaggcatggagttaaccgacaacctgatggcatttgtcgaacgtaaactcttcaccctgaacacgggtcatgctataaccgcgtacctcggaaaactggccggtcatcagaccattcgtgacgcgattctcgacgagaaaatccgcgcggtggtaaaaggtgcgatggaagaaagtggtgcagtattgatcaagcgctacggctttgacgctgacaagcatgcggcgtacatccagaaaattctcggccgttttgagaacccgtatctgaaagatgatgtagagcgcgtaggccgtcagccactgcgtaaactgagtgctggtgaccgtctgatcaagccactgctcggtacgctggaatatggtctgccacataaaaacctgattgaaggtattgccgctgcaatgcacttccgcagtgaagatgatccgcaggctcaggaactggcagcactgatcgctgacaaaggtccgcaggcggcgctggcacagatttccggtcttgatgccaacagcgaggttgtatccgaggcggtaaccgcttataaagcaatgcaataatggtggaccaggcgcaggacaccctgcgcccgaataacagattgagtgatatgcaggcaacaatggaacaaacccaggcctttgaaaaccgtgtgcttgagcgtctgaatgctggcaaaaccgtgcgaagctttctgatcaccgccgtcgagctcctgaccgaggcggtaaatcttctggtgcttcaggtattccgcaaagacgattacgcggtgaagtatgctgtagaaccgttactcgacggcgatggtccgctgggcgatctttctgtgcgtttaaaactcatttacgggttgggcgtcattaaccgccaggaatacgaagatgcggaactgctgatggcattgcgtgaagagctaaatcacgacggcaacgagtacgcctttaccgacgacgaaatccttggaccctttggtgaactgcactgcgtggcggcgttaccaccgccgccacagtttgaaccagcagactccagtttgtatgcaatgcaaattcagcgctatcaacaggctgtgcgaagtacaatggtccttagtctgactgagctgatttccaaaatcagcttaaaaaaagcctttcaaaagtaagcaacgtctgcttactgcccctctacctgcttcggccgataaagccgacgataatactccagacgttgtagatataacggcacgctttcatcgggtattccggacggaatcgcgttacggggaggaagttttttcagatactcccggaacgcctggctacttgccatgaaatctacggctttatcgataagaagcggaacgttttcacctaatttgcccatgatgatatctccgtattaccccgcgccgggaatgcgcggccgccaattttagtttaggttcccggtaaagatgacattaaggaaaacgtgctgaatcctcaataatcatccgctgctgtttattatcttttttctatagatttcttaattaatcaacgaattgcgcagtttttgagcatgttaatgattacgttacagaactattacaatgtcattagttgtgaacaaagcacctggtcgcgcatactaggggctataaatttatctttatcagaagccatcacatgaaagaagtcgaaaaaaacgaaatcaaacgcctcagcgatcgcctggacgccatccgccaccagcaggccgatcttagcctggttgaagccgcagacaaatatgccgagctggaaaaagagaaagccacgctggaagcagaaattgctcgcctgcgtgaagttcatagccaaaaactgagtaaagaagcacagaagctgatgaagatgccattccagcgcgcaattaccaaaaaagagcaggctgatatgggcaagctgaagaaaagtgttcgcggactggtcgttgtgcacccaatgaccgcactgggccgcgaaatgggcctgcaggagatgactgggtttagtaagaccgcgttttaagaacacagtatctacagggtgattctgcacattcctataggccgagtaaggtgttcacgccgcatccggcaagataaggcgctctggatcaacaacctaagggcaattctctgatgaggattgcccttttctttaccagacatctccccccacaagaattggccctaccaattcttcgcttatctgacctctggttcacaatttcccaattaaaactcacatcaatgttgccaatacataacatttagttaaccattcattgtcattatccctacacaacacaattggcagtgccacttttacacaacgtgtgacaaggagatgagcaacagactcattacacgatgtgcgtggactccaggagacctgcaatgaatctctggcaacaaaactacgatcccgccgggaatatctggctttccagtctgatagcaagccttcccatcctgtttttcttctttgcgctgattaagctcaaactgaaaggatacgtcgccgccagctggacggtggcaatcgcccttgccgtggctttgctgttctataaaatgccggtcgctaacgcgctggccagcgtggtttatggtttcttctacgggttgtggcccatcgcgtggatcattattgcagcggtgttcgtctataagatcagcgtgaaaaccgggcagtttgacatcattcgcagctctattcttagcataacccctgaccagcgtctgcaaatgctgatcgtcggtttctgtttcggcgcgttccttgaaggagccgcaggctttggcgcaccggtagcaattaccgccgcattgctggtcggcctgggttttaaaccgctgtacgccgccgggctgtgcctgattgttaacaccgcgccagtggcatttggtgcgatgggcattccaatcctggttgccggacaggtaacaggtatcgacagctttgagattggtcagatggtggggcggcagctaccgtttatgaccattatcgtgctgttctggatcatggcgattatggacggctggcgcggtatcaaagagacgtggcctgcggtcgtggttgcgggcggcagctttgccatcgctcagtaccttagctctaacttcattgggccggagctgccggacattatctctagcctggtaagtctgctctgcctgacgctgttcctcaaacgctggcagccagtgcgtgtattccgttttggtgatttgggggcgagtcaggttgatatgacgctggcccacaccggttacactgcgggtcaggtgttacgtgcctggacaccgttcctgttcctgacagctaccgtaacactgtggagtatcccgccgtttaaagccctgttcgcaagcggtggcgcgctgtatgagtgggtgatcaatattccggtgccgtacctcgataaactggttgcccgtatgccgccagtggtcagcgaggctacagcctatgccgccgtgtttaagtttgactggttctctgccaccggcaccgccattctgtttgctgcactgctcagcattgtctggctgaagatgaaaccgtctgacgctatcagcaccttcggcagcacgctgaaagaactggctctgcccatctactccatcggtatggtgctggcattcgcctttattagcaactattccggactgagtagtacactggcgctggcactggcgcacaccggtcatgcattcaccttcttcagcccgttcctcggctggctgggggtattcctgaccgggagcgataccagttctaacgccctgttcgccgcgctgcaagccaccgcagcacaacaaattggcgtctctgatctgttgctggttgccgccaataccaccggtggcgtcaccggtaagatgatctccccgcaatctatcgctatcgcctgtgcggcggtaggcctggtgggcaaagagtctgatttgttccgctttactgtcaaacacagcctgatcttcacctgtatagtgggcgtgatcaccacgcttcaggcttatgtcttaacgtggatgattccttaatgattgttttacccagacgcctgagtgacgaggttgccgatcgtgtgcgggcgctgattgatgaaaaaaacctggaagcgggcatgaagttgcccgctgagcgccaactggcgatgcaactcggcgtaagtcgtaatagtctgcgcgaggcgctggcaaaactggtgagtgaaggcgtgctgctcagtcgacgcggcggcgggacgtttattcgctggcgtcatgacacatggagcgagcaaaacatcgtccagccgctaaaaacactgatggccgatgatccggattacagtttcgatattctggaagcccgctacgccattgaagccagcaccgcatggcatgcggcaatgcgcgccacacctggcgacaaagaaaagattcagctttgctttgaagcaacgctaagtgaagacccggatatcgccagtcaagcggacgttcgttttcatctggcgattgccgaagccagtcataacatcgtgctgctgcaaaccatgcgcggtttcttcgatgtcctgcaatccagtgtgaagcatagccgtcagcggatgtatctggtgccaccggtttttagtcaactgaccgaacaacatcaggctgtcattgacgccatttttgccggtgatgctgacggggcgcgtaaagcaatgatggcgcaccttagttttgttcacaccaccatgaaacgattcgatgaagatcaggctcgccacgcacggattacccgcctgcccggtgagcataatgagcatagcagggagaaaaacgcatgattatttccgcagccagcgattatcgcgccgcagcgcaacgcattctgccgccgttcctgttccactatatggatggtggtgcatattctgaatacacgctgcgccgcaacgtggaagatttgagtgaagtggcgctgcgccagcgtattctgaaaaacatgtccgacttaagcctggaaacgacgctgtttaatgagaaattgagcatgccggtggcactggctccggtgggtttgtgtggcatgtatgcgcgtcgtggcgaagttcaggcagccaaagcggcggacgcgcatggtattccgtttactctcagcacggtttccgtttgcccgattgaagaagtcgcgccagccatcaagcgcccaatgtggttccagctttatgtactgcgcgatcgcggctttatgcgtaacgcgctggagcgagcaaaagcagcgggttgtagcacgctggttttcaccgtggatatgccgacaccgggcgcacgctaccgtgatgcgcatagtggtatgagtggcccgaacgcggcaatgcgccgctacttgcaagcggtgacacatccgcaatgggcgtgggatgtgggcctgaacggtcgtccacatgatttaggtaatatcagtgcttatctcggcaaaccgaccggactggaagattacatcggctggctggggaataacttcgatccgtccatcagttggaaagaccttgaatggatccgcgatttctgggatggcccgatggtgatcaaagggatcctcgatccggaagatgcgcgcgatgcagtacgttttggtgctgatggaattgtggtttctaaccacggtggccgccagctggacggtgtactctcttccgcccgtgcactgcctgctattgcagatgcggtgaaaggtgatatagccattctggcggatagcggaattcgtaacgggcttgatgtcgtgcgtatgattgcgctcggtgccgacaccgtactgctgggtcgtgctttcttgtatgcgctggcaacagcgggccaggcgggtgtagctaacctgctaaatctgatcgaaaaagagatgaaagtggcgatgacgctgactggcgcgaaaagcatcagcgaaattacgcaagatagcctggtgcaggggctgggtaaagagttgcctgcggcactggctcccatggcgaaagggaatgcggcataatcgtttgcgccccctcaccctaaccctctccctcagggagaggggaccgttcggcgctgtatgtactccctcactctgaaacgacaccgcactctttttttctccctcgcccctccggggagagggccggggtgaggggaaaaggccgcactgctcaccaattttctgctatcctgcccccgcactaagggggcagtatgctaaacatcgtactttacgaaccagaaattccgccaaatactggcaacatcatccgtctttgcgctaataccggctttcgtctgcatatcatcgaaccgatgggatttgcctgggacgataagcgcctgcgccgcgcggggctggactatcacgagtttaccgccgttacgcgtcatcatgactatcgcgcgttcctcgaagcagaaaatccccagcgcctgttcgccctcaccacgaaaggtacacctgctcacagcgccgtaagctatcaggatggcgattatctgatgttcggcccggaaacacgcggcctgccagcgagcattcttgatgccctgcccgctgaacaaaaaattcgcattccgatggtgccggacagccgcagcatgaatctgtccaatgcggtgagcgtagtggtgtatgaagcctggcggcagttggggtatccgggagcggtattgagagattaattactgtaggccggatagatgattacatcgcatccggcacgatcacaggacattagatcccatccccatactcaaatgtatggttaataccgttgaaatgctggtccatatccatacttggcttatcgctgtctggtttaccgacaatacgagccggaacgccagcggcggtggtatgcggcggcaccggttgcagcaccacggaacctgcgccaatcttcgcgccgcgcccaacttcaatattgccgaggattttcgcgcccgcgccaatcatcacaccttcacgaattttcgggtgacggtcaccaccagatttacccgtaccgccaagcgtcacagattgcagaatgcttacgtcgttttcaatcaccgccgtttcaccaacgacgatgcctgtcgcgtggtcaagcatgataccgcgaccaatttttgctgccgggtgaatatcgacctggaacgtcacagaaacctggttttgcagaaagattgccagtgcgcgacgcccctgattccacaaccagtgaccgatgcgataggcctgcaaggcatgaaaacccttcaggtataacaacggggtactgtatttatcgactgccgggtcgcgggtacgcaccgcctgaatatcacaggccgcagaggcgatcatttccgggtcagcggcgtaggcttcttccaccacttcacggatagcaatagcaggcataattgggctactcagcttgttcgccagcatgtagctcagtgcactgccaaggttttcgtgcttgagtagcgtcgcgtggtaaaaactggccagcattggctcacagtccgccagcgttctggcttcggctttaatattgttccagacaatttccagttcttcacagctcattgcttactccacacgatgagataatgaccggcccgttctgcgcgggccgggtcatagcggtaacaaaggttccctggggttagtggctgctgcgctcgtccttgcgtgcacgacctagtaaagtcaatgctgcctcgcgcgcgttttttccgcaatataatacttgataaatttcctcggttattggcatttcaacgccgaagcgatgcgccagttcgcggacttctttcgtattgcggtagccttccaccacctgaccaatcttctcctgcgcgctttgtacatccatgccctgaccgagcatcatgccaaaacggcggttacggctctggttgtcggtacaggtaagcaccagatcgccaagccccgccatgcccataaaggtggcagggtcggcacccagcgccgcaccaagacggctcatttcagccagcccacgggtgatcagcgccgtacgcgcattcgcaccaaaaccgataccgtcggacatccccgcaccaatggcaataacgtttttcaccgcgccgccaagctgcacgccaatgaaatccggattgctgtaaacgcggaaacttttgccgcagtgcagcagctgctggagatcatcggcaaaggtctgatcggtgctggccaggctaatagctgtcggtaaacctgccgccagttctttcgcaaacgttgggccagagataaccgccagcggaatttgatcgcctaaggcctcacgcgccacgtcctgtaacagacgtccggtttccgcttccagccctttggtcgcccacaccagacgcgcatcaggacgcatcagtggtttaatctggcgcagcacttcaccaaagacatggctgggtacgacgacgagaatattacggctggctgccagcgcagtggcgagatcgctttcaagatggagcgtatcgggaaaaggcacatcggggagaaacgcggcgttacagcggtcgcgttcaagcgttgcgatatgttcagggtcatggccccagaggacaacctcgtggccatttcttgccagggtgatggcaagagcggtgccgtagctgccggcaccgatcacagtcatactagcattacgttggttcatcaggcatcctgatgttcttcagtaccttcgccagcctgctgctgcaaatagttcatgaacagcgcatcgaagttaaccggcgcaaggttcagttgcgggaatgtaccgcgggataccatgctggtgatgcactcacgagcatacgggaacagaatgttcgggcagtatgctcccaggcaatgcgccatctgggtgccttcgatacccgcgatggagaaaataccgccctgctgaacttcacacaggaacgcggtttcttcgcccaaagaggccgttacggtaacacgcagtaccacttcgtatacgtcatctgccagttgggaagatgccgtatccagatcaagtttaacttctggttgccaatctttctggaaaacgtgcggcgcgttcggcgcttcgaaagagatatccttggtataaatacgttggatctggaaagtcatttcagtgttgttttgttcactcatgtgtagaaaacccttaagtgttgtccttaaatactgcgcaatgtaatgccaacgttcacacgttatttcagcaggggatccagtccaccacgtgcatccaatgcatacaagtcatcacagccgccaatgtgctgtgcgtcaataaaaatctggggaaccgtggtgcgaccgctgcgtttgatcatctcttcacgcttggcggcgttgccatcgatcggcagctcctggaaactcacgcccttgctgctcagcagtgcttttgcacgatggcaatacgggcaggtttctttggtatagatttcaacattggccataaattagctcctgtttttttaccctgaaatttcatgttgcagggcggcagcaaaatggagtgtccccagaagcttataacaataagtcgctgggggcctaattgcagctaacggcctgcatcatgaaagacgacaggtaaattatttgccgcgcaccaaaggcaagttttcgccagcccagccagcgacgccttctttcagcacgaatacttgcgcaaaaccagctttcgtcagtgcgtttgcaggctcctggcactgcatgccagaaccgtctaccacgataaccggtttgtctttgtgcttctcaagctcaccaacattgttggctttgatttcgctcggcaacagattaatagaacctgcgatatggcctttacggaagtcatcacgctgacgtaaatccacaaccacagcgtcttctttgttgatcagacgcgtagcttcaccacgagtaatcaccttcactttgctggtcaggctcttaaacgtagtcacaagaaccgccaccagtaacgcgatccaggcgatactcagtatgggatgacggccaacaaattgcataatttcttgcatggggggtaacaactcccgacgtagtgattaaaaaaaccaggaaaggagtatacctgcgcggtgcggcaaatacagccagcgcgttaactggaatgcaattttgcggggcgcgacgaaaaaaaagcgtaaatctggcatcggcttgccgcgagcggtcgtatattttgatcttcagaggctattttatcgattcagctgtagtaaaattacgcaaattttgactcttgagtatgaggttgtcgcaatgttggtttctaaaaaacctatggtactggtgattctggatggctatggctatcgcgaagaacagcaggataacgccatttttagtgctaaaaccccggtaatggatgcactgtgggccaatcgtccgcataccctaatcgacgcttccggtctggaagtcggtctgcctgaccgtcagatgggtaactccgaagtaggccacgttaacctgggtgccggccgcatcgtgtatcaggacctgactcgtctggacgttgaaatcaaagatcgcgctttctttgctaatccggtgctgactggcgcggtagataaagcgaaaaacgcaggcaaagcggtacacattatgggtctgctctccgcaggcggcgtacacagccacgaagatcacatcatggcgatggtagaactggcagctgaacgcggcgcagaaaaaatctacctgcacgcattccttgacggtcgcgacactccgccgcgcagtgctgaatccagcctgaaaaaattcgaagaaaaatttgccgcgctgggcaaaggccgcgtagcgtccatcattggtcgttactacgcgatggaccgcgataaccgttgggatcgcgtagaaaaagcttatgacctgctgactctggcgcagggcgagttccaggccgataccgccgttgctggtttgcaggctgcttatgctcgcgacgaaaatgatgaattcgtgaaagcgaccgttatccgtgctgaaggtcagccagacgcggcaatggaagacggcgatgcactgattttcatgaacttccgtgctgaccgcgcgcgtgaaatcactcgtgctttcgtgaacgctgatttcgatggcttcgcgcgtaagaaagtggttaacgtcgatttcgtgatgctgaccgaatacgccgctgacatcaaaactgcggttgcttacccacccgcttccctggttaacaccttcggcgagtggatggcgaaaaacgacaaaactcagttgcgtatttccgaaaccgaaaaatatgcccacgttactttcttcttcaacggtggcgtagaagagagcttcaaaggcgaagatcgcattctgatcaacagtccgaaagtggctacctacgatctgcaaccggaaatgagctccgcagagctgaccgaaaaactggttgcggccatcaagagcggcaaatacgacaccatcatctgtaactatccgaacggcgacatggtaggtcacaccggggtgatggaagcggcggttaaagcggttgaagcgctggatcactgcgtggaagaagtcgcgaaagcggttgagtccgtgggtggacaactgctgatcaccgctgaccacggtaacgctgagcagatgcgcgatccggcaacgggtcaggcacacacggcacacaccaacctgccagttccgctgatttacgttggtgataagaacgtgaaagcggttgaaggcggcaaactttctgacatcgcgccgaccatgttgagcctgatgggtatggaaatcccgcaagagatgactggtaagccgctgttcatcgtggaataatccctccccatgaggggaaaggcgattaataccatgacacgggccgtgaaaccgcgcaggtttgcaatcaggcccatcatctacgccagcgttcttagcgctggcgtattgttgtgcgccttttccgcccacgcggatgagcgtgaccaactcaaatctattcaggctgacatcgccgcaaaagagcgcgcggtacgccaaaagcaacaacaacgcgcaagcctgctcgcacaattgaaaaagcaggaagaagcgatctctgaagccacccgtaagctgcgcgaaacgcaaaacacgctcaatcaactcaataaacagattgatgagatgaacgcgagcattgccaaactggagcagcaaaaagccgcccaggagcgcagcctcgccgcacaactggatgccgcattccgtcagggcgagcataccggtattcagctgattctcagcggtgaagaaagccagcgtggacagcgtttacaggcttatttcggctatctcaaccaggcgcgacaagaaaccattgcccagttgaagcaaacgcgtgaagaagtcgccatgcagcgtgctgaactggaagagaaacagagcgagcaacaaacgctgttatatgagcagcgcgcccaacaggcgaaactgactcaggcgctgaacgagcgtaaaaagacgctggcagggctggagtcttccatccagcaaggtcagcaacagttgagcgagctgcgcgccaacgaatcccgtctgcgtaacagcattgcccgtgcggaagccgcggcgaaagcgcgtgcagaacgagaagcacgtgaggcccaggcggttcgcgaccgccagaaagaagcgacgcgcaaaggcaccacctacaaaccgaccgaaagcgaaaaaagcctgatgtcccgtaccggtggtctgggcgcgccgcgtggtcaggcattctggccggttcgcgggccgacgctgcatcgctatggcgaacagctacagggtgaattacgctggaaaggtatggttatcggtgcttctgaaggtactgaagttaaagcgattgccgacggtcgggtgattctggctgactggctgcaaggctacggtctggtggtggtggttgagcatggtaaaggcgacatgagtctttacggctataatcagagcgcactggtgagcgttggtagccaggttcgcgcgggccagccgattgcactggtgggcagcagtggcggtcagggtcggcctagtctctatttcgaaattcgccgccagggtcaggcggtcaatccacagccgtggttgggaagataagttttgtttccatttcgtcgtaacgttcttgcatttgccgctctgttggcgctctcctcccccgtacttgctggcaaacttgccatcgtcattgatgattttgggtatcgcccgcacaacgaaaaccaggtgctggcgatgccttccgctatctccgtcgctgtattacccgatagtccgcacgccagagagatggcgaccaaagcgcataacagcgggcacgaagtgttgattcatctcccgatggcaccgttgagtaaacagccgctggagaaaaatacgctacgcccggagatgagcagcgacgaaattgagcgcattattcgtagtgcggtcaataacgtgccctatgccgtggggatcaacaaccacatgggcagcaagatgacctctaacctgtttggtatgcagaaagtgatgcaggcgctggagcgttacaatctttacttcctcgacagcgtaaccatcggtaatacccaggcgatgcgcgccgcgcaaggcactggcgtgaaggtgatcaaacggaaggtattcctcgacgatagccaaaatgaagcggacatccgtgtgcaatttaatcgcgcaattgacctggcgcgtcgcaacggtagcaccattgccattgggcatcctcaccctgcaacggtacgcgtgttgcaacagatggtttataacctgccgccagacattacgctggtgaaagccagcagcttgctgaatgaaccgcaggttgatacttctacaccgccgaaaaacgctgtgcctgatgcaccgcgtaatccgttccgtggcgtgaagctgtgcaaaccgaagaaaccgatagaacctgtttatgctaatcgcttctttgaagtattaagcgaaagcatcagccagagcacgctgatcgtttacttccagcatcagtggcaaggctggggcaaacagcccgaagcggcgaagtttaacgctagcgcaaattaattagcgcaaattaaaggcgctacgcgtaatgcgatggtggctccgcgttttgtcgcgccattgccataagcggaaagaccacagtaacgcctggtaaccgaccttcacgctgcgcacattggtaatcaggcgcttatacataccggaagtaaatatctcggcaatcatccgttggcgggtaagaatatccggctctttgcgcaccgcatggcaaacacgcaatgcctcgtaagttatttgctgatgaaattccggataaatcataattttgtcggcataatttcgatttaatttctccagcaggcgggtaatcttaatatagtgacgttgataattaaggtttttattcccttgtctatgcaaccgactcacactcgtattatgcagataatatttatataaactttgctcggtatatcgcgcacgcagcgcgttaaacatgaattctgttgtccagacaatatcctgatgatgtaatccggcaataaatttaatgttatttttaacaataacatcacggcgataaacccccatccagacaacgtgagtccaacggcggctagaaagccccatccgcagccagtccgggccggttaatacgccggtactgcgaaggcgatcggtggggatggattgccaggtttctcccgtttcacgaaaacaccagtcagcgttgcactgcgccacgtcgaggtcgtcctctaacgccatggtcatcagcgtttcgtacatggtgggacagacttcatcgtcagcatcgacaaaagcgacatatttgcccgttgccacttcaatcccacgattacgcgccacgcttgcgccagcattcgcctgatgcaacaaacgaacgtgcggatagttttctgcgtaatactttgctatttcaacagaattatccgtactaccatcgttaataataatgatttccagagcagtccaggtttgcgtaattaaagattccatacaagtgcggaaatcatcgcccgcattatataacggaataataacactaagtttattggtgctgttcatcataaattaccgacgacctctgaagttatcctgacgttttacaggctttgtattaagaaactattaagcctgtgagatattatttttacaggtgagagagtcacttcagggtagagagataatgagagcagctatataagagatcagcacaattacgaactctttattacactgacaggattttacatatttaacagattatcctcagataaaagggctggaataccagcccttgttcgtgttaatcccagctcagaataactttcccggactggccgctacgcatagcgtcaaagcccttctggaaatcatcgatagagaaacgatgggtaatgatcgggctaagatcgaggccagactgaatcagcgccgccatcttgtaccaggtttcaaacatctcacgaccgtaaatacctttaatgaacaagcctttaaagatcactttggtccagtcgatagacatatcagacggcggaatacccagcatcgcaatacggccgccgtgattcatggtgtcaagcatggtacgaaacgctggcggcgcaccggacatttccagaccgacatcaaaaccttcggtcatgcctaactccgccatcacgtcattgagattttctttggcgacgttaaccgcacgggtgatacccattttacgcgccagctcaaggcggtattcgttaacatcagtgatcaccacattgcgtgcaccaacgtgtttcgccaccgccgctgccataataccaatcgggcctgcaccagaaaccagcacatcttcgcccaccagatcaaagctcagcgcggtatgcacggcgttaccgaagggatcaaaaattgcggctaagtcatcggaaatattgtcggggattttgaaggcgttgaatgccgggatcaccagatattcggcaaagcagcccgggcgattaacaccaacgcctatcgtgttgcggcacaaatgggtacgaccaccacgacagttgcggcaatgaccacaggtgatatggccttcgccagaaacgcgatcgccgatcttgaagcctttcacttcctgaccaatacctaccacttcaccgacatattcatggcccacgaccatcggcaccgggatggttttttggctccactcatcccagttatagatgtgaacgtcagtcccgcagatggctgttttacggattttaatcagcagatcgttatgcccgagttccggtacaggaacgtcggtcatccagatgccctcttccgctttcagtttggataacgctttcatctcacatcctcaggcgataacgcccagttgtttaccaatacgcgtaaatgcttctactgcacgcgtaatttgctcaggggtatgcgccgcagacatctgggtacgaatacgcgcctgacctttcggaacgaccggatagaagaaaccggtaacgtaaatgccctctttttgcagctcacgggcaaatttctgcgccactaccgcatcaccaagcatgaccggaataatggcgtgatcggctcccgccagggtaaagcccgccgcgctcatttgctcacggaactgacgcgcgttcgcccacagacggtcacgcagttcgctgcccgcttcgaccatctccagtactttgatggacgcggcaacaatggccggtgccaggctgttggagaacaggtacggacgagaacgctggcgcagccactcaaccacttctttgcgcgccgcggtataaccaccagaagccccgcccagcgctttaccaagcgtaccggtgataatatcgacccggcccatcacatcgcagtattcatgggaaccacgaccattttcaccgacaaaaccgaccgcgtgggagtcgtctaccatcaccagggcatcatatttatctgccagatcgcaaacgcccttcaggttggcaatcacgccgtccatactgaacacaccatcggtggcgatcagcacatgacgcgcaccggcttcacgcgcttctttcagacgtgcttccagctcctgcatatcgttgttggcatagcgatagcgtttagctttgcacagacgcacaccatcaataatagacgcgtggttcagtgcgtcggagataatggcgtcttccgcacccagaagcgtttcaaacaggccaccgttagcatcaaagcaggaagagtagagaatcgcatcttccatccccaggaaggccgccagtttttgttcaagctctttatggctgtcctgagtgccgcaaataaaacgcacgctagccatgccgaaaccgtgagaatccattcccgcctttgccgccgcaatcagatcaggatgattcgccagcccgagatagttgttggcacaaaagttaatgacgtggcttccatcagccacagtgatatctgcttgctgcgcagacgtaataatgcgctcttctttaaacaacccttccgcccgtgcggtttccagatcgttggttaactgctgataaaattctccacgcattgcgattctccagacagggcaaattccagcacatattacccaaacttataggtcgcgacgagataacgcgttaacacttctgcaaaattcaggataaataacgtgtaacttgatgtctctcaacacctacagatagtagaaaaactgtacagttttggctgggcataatgatgattgattttactgcattgatataaaaagaaaaaatgatgccaaagcatcatttttcctatctcagttggtatcaaaacgctacccactaatggagggaaacttattttctactaaggaaaattctcagcgcctgcatttttgcccctaaagtgttactcctgaagcagcgaaacaaatcgaaccattttcctctccccagatagtttaggttgaagagatcggggcgtttgtaatagcacatgacaaaaatgccctggtcatcgtccacaatgttattatttagtgttattttttgactttccagaactaatttatagaattctttccatttatgctgactaccaacaattgcgcccccaataatatatacatgattgccaatcatgaaatcaaaaacctgttgttgagatgtgacagtaagccctttttttatagtgaaaagatgcatcttactttcatcaaatgggaaatcccaaattttcaatcctcgagttacatttggcttatggcaatagccaaaatctatccacgcaacaagaggcgttttcactaagcccatgttgatagctttatttacaaaataggccttaaggttacataccaaaacatactctggactccagtactctgggttttttaattgtcgaggctcaagtctatttgtaaagctctcatctttttgaattttttcgatacgacttctgatatatctaaatttcttttttatatcgataacgataaccgttgttggttttccgttgcgaatcgcttcaacccttggtttcaaatcgggagaagtgaaaataatcatctcattttcaagtgcggccagacgctcaaagtaactaaaataaacatcaacactacgagctagtttttcacggaaccctttattagcagtccaatcccctctaccaatgtcaaaatatgcagtgataattgtggtggaacttttcattactaataagaccattaatataaaaaaagaattatatcataaatattaatagaatgtatactgtatattatccattcaaatgcttccgttatttatcatacatcggaatattgatactaaagcactattcacatgcaaaaccaacatccgccatgaaggactagctaaaacccaaactagtttgttgcaattagcatccttgcacctctatgtaaagggctgaagggattcggatgtgatggtatgattacagacattcgtgtctgagattgtctctgactccataattcgaaggttacagttatgatcatcgttaccggcggcgcgggctttatcggcagcaacatcgttaaagccctgaatgataaaggcatcaccgatattctggtggtggacaacctgaaagacggcaccaagtttgtgaacctggtggatctgaatatcgcagactatatggataaggaagacttcctgatccagattatggctggcgaagagttcggcgatgtcgaagcgattttccacgaaggcgcgtgctcttccaccaccgagtgggacggcaagtatatgatggataacaactatcaatactccaaggagctgctgcactactgcctggagcgtgaaatcccgttcctgtacgcttcttccgcagccacctacggcggacgcacctccgactttattgaatcccgcgagtacgaaaaaccgttgaacgtctacggttacagtaaattcctgtttgatgaatatgttcgtcaaatcctgcctgaagcgaacagccagattgttggcttccgttatttcaacgtttatggaccgcgtgaaggccataaaggcagcatggcgagcgtcgctttccatctcaacacccagcttaacaacggtgaaagtccgaagctgtttgaaggtagcgagaacttcaaacgcgacttcgtctatgtgggcgacgtggctgatgtgaatctgtggttcctggaaaatggcgtttccggcatcttcaatctcggtactggtcgtgcggaatccttccaggcggtagctgatgctacgctggcttatcacaagaaaggccagatcgaatacattccgttcccggataaactgaaaggccgctatcaggcgttcactcaggcagatctgacaaatctgcgcgcggcgggttacgacaaaccgttcaaaaccgttgctgaaggtgtaacggaatacatggcctggctgaatcgcgacgcataagagctctgcatgaaaatactggtgatcggcccgtcttgggttggcgacatgatgatgagccaaagtctctatcgcacgctccaggcgcgctatccccaggcgataatcgatgtgatggcaccggcatggtgccgtccattattaagccggatgccggaagttaacgaagctattcctatgcctctcggtcacggagcgctggaaatcggcgaacgccgcaaactgggtcatagcctgcgtgaaaagcgctacgaccgcgcctacgtcttacccaactccttcaaatctgcattagtgcctttcttcgcgggtattcctcatcgcaccggctggcgcggcgagatgcgctacggtttactcaacgatgtacgcgtgctcgataaagaagcctggccgctaatggtggaacgctatatagcgctggcctatgacaaaggcattatgcgcacagcacaagatctgccgcagccattgttatggccgcagttgcaggtgagcgaaggtgaaaaaagttatacctgtaatcaatttagccttagtagtgaacgtccgatgattggtttttgcccgggtgcggagtttggtccggcaaaacgctggccacactaccactatgcggagctggcaaagcagctgattgatgaaggttatcaggtggttctgtttggcagcgcgaaagatcatgaagcgggcaatgagattcttgccgctttgaataccgagcagcaggcatggtgtcggaacctggcgggggaaacacagcttgatcaagcggttatcctgattgcagcctgtaaagccattgtcactaacgattctggcctgatgcatgttgcggcggcgctcaatcgtccgctggttgccctgtatggtccgagtagcccggacttcacaccgccgctatcccataaagcgcgcgtgatccgtttgattaccggctatcacaaagtgcgtaaaggtgacgctgcggagggttatcaccagagcttaatcgacattactccccagcgcgtactggaagaactcaacgcgctattgttacaagaggaagcctgacggatgcgggttttgatcgttaaaacaagcagcatgggcgatgttctccatacgttgcccgcactcactgatgcccagcaggcaatcccagggattaagtttgactgggtggtggaagaagggttcgcacagattccttcctggcacgctgccgttgagcgagttattcctgtggcaatacgtcgctggcgtaaagcctggttcagcgcccccataaaagcggaacgcaaagcgtttcgtgaagcgctacaagcagagaactatgacgcagttatcgacgctcaggggctggtaaaaagcgcggcgctggtgacgcgtctggcgcatggcgtaaagcatggcatggactggcaaaccgctcgcgaacctttagccagcctgttttacaatcgtaagcatcatattgcaaaacagcagcacgccgtagaacgcacccgcgaactgtttgccaaaagtttgggctatagcaaaccgcaaacccagggcgattatgctatcgcacagcattttctgacgaacctgcctacagatgctggcgaatatgccgtatttcttcatgcgacgacccgtgatgataaacactggccggaagaacactggcgagaattgattggtttactggctgatagtggaatacggattaaacttccgtggggcgcgccgcatgaggaagaacgggcgaaacgactggcggaaggatttgcttatgttgaagtattgccgaagatgagtctggaaggcgttgcccgcgtgctggccggggctaaatttgtagtgagcgtggatacggggttaagccatttaacggcggcactggatagacccaatatcacggtttatggaccaaccgatccgggattaattggtgggtatgggaagaatcagatggtatgtagggctccaagagaaaatttaattaacctcaacagtcaagcagttttggaaaagttaagtagtttataaaggtaaaacatgctaacatcctttaaacttcatagtttgaaaccttacactctgaaaagtagtatgattttagagataataacttatatattatgtttttttagtatgataattgcattcgtcgataatactttcagcataaaaatatataatatcactgctatagtttgcttattgagtctaattttacgtggcagacaagaaaattataatataaaaaaccttattcttcccctttctatatttttaataggcttgcttgatttaatttggtattctgcgtttaaagtagataatagcccatttcgtgctacttaccatagttatttaaatactgccaaaatatttatatttggttcttttattgttttcttgacactaactagccagctaaaaagtaaaaaagagagtgtattatacactttgtattctctgagttttctaattgctggatatgcaatgtatattaatagcattcatgaaaatgaccgcatttcttttggtgtaggaacggcaacaggagcagcatatagtacaatgctaatagggatagttagtggcgttgcgattctttatactaagaaaaatcatccttttttatttttattaaatagttgcgcggtactttatgttctggcgctaacacaaaccagagcaaccctactcctgttccctataatttgtgttgctgcattaatagcttattataataaaagtcccaagaaattcacttcctctattgttctactaattgctatattagctagcattgttattatatttaataaaccaatacagaatcgctataatgaagcattaaatgacttaaacagttataccaatgctaatagtgttacttccctaggtgcaagactggcaatgtacgaaattggtttaaatatattcataaagagtccttttagttttagaagtgcagagagtcgcgctgaaagtatgaatttgttagttgcagaacacaataggctaagaggggcattggagttttctaacgtacatctacataatgagataattgaagcagggagtctgaaaggtctgatgggaattttttccacacttttcctctattttagtctattttatatagcatataaaaaacgagctttgggtttgttgatattaacgcttggcattgtggggattggactcagtgatgtgatcatatgggcacgcagcattccaattatcattatatccgctatagtcctcttactcgtcattaataatcgtaacaatacaattaattaagaataaacaagtttaagaagtgagttaaaactcacttcttatctatacaacttaatctctttacactattagttaaagtttcagtatcgatatcttttaccgtatatgttggggatactatttgtatagatttatgatgattcggggaccaaattaaatggctgggatattccggagtacgactattagggtaaaatgcaagcgttggtttatgataagccgcagcgatatgaacaagagctgtatcaacagaaatgacaaaatcactatacttggtcaacgcaacggtataaataaactcatcaaatggtagtgtttcgatttcaagtattggtattgtcaataaatcttgcggtaacccggtaaatataatccgataattttcaaagtgtgttttcacttcttgatatataacttttatttgctcaaacgtaagacggcatattttttttgcacctaatggattaataatgactattcttgtatctccaataaattcttttattttatcttcaacatctactggtaaatgcaagtcgtagttggtggaaaatttaccctcaccataaatatgcttcagtatttctattgctcgtgtactcatatgttcttttaaacattcatcgtggggatggtaaaaactatagtaacgcttataccaatgatcaaaacccagaatgtaagaatcttttaaactacttaatattaagctatgcttaaaactgggcatagtttcaaaggggtctaatacaatatcgaactgtaaatcccgcagatgcttacatagagtaagcatttcaagaaaaccggtactttctttaatacagaactcaaatatatttttattattagagagaaattccccaccctttctatttgtgagaagagttattttaacccctttactataaagttcacgataaatgctacttaatacaattagatcaccaagtttattattatcatgaataataaggcaacttttaacttgtgctggatctgtaatttgattatttattttattacgaaataaaaaagaaaggaaattaatcttgattttgtttatataaaatcttttctttttgtgaaaagttcctaagcgcatttttataccatattattttagtttcaggatgattaattagcataagaatcggtactagttctatattgcattttttttcttgtcatatctttactttcttctgcactgatgtcttgaagtttaataaatggaattacatcgtaagaaatagctgtatcatcacttaaattataaatattaatatcttttacattatcatgcataaaacgaaaaaatggcaatattttgaataaatccctacttaattcgctgggcatgggatttttattctcatcatagaaacgagaacagctacccgttaaatcaagaccagaacaaataatccgcgcatacttaagactatatgcgatttgaattgcagcaaaggcaatagtatggcaactgcaataaccaagactaatgtccttgcaaaatccaaccagacgaccttttttagacaacggtacagagatcagcagttctttgtgaatctgtctcaaaatattaaatttaatcttctttataaaaccacctttttcccgacggtaaaaggaccgtaatacgaggcagttctggaggatataaagtttatcttctttggaagcgtgttcataaacgtcaacgtttactatggtataacgacttctctggctaaatttataaaaatcatcacgacgctgatgtaaaaatcggacatctgtaagtacatatataaaaggaacgatattattacttaacagatattgcgcagaaccattgacagcaataatatcctttgttcgtaatacactcaaaggtgttttttggcttgtagggccgctaagaaaaataataacatcatcagatattttattttcaatcaggttttcaacatcttttttgtcaatgtatctaatattcttcatgataaacctgtgaaataaataactccgcttaaaactgtcctggtgaagacatgtaattgtgggattttttttagcgcgctggtttccctttcaaacgccgcataaaattgcgcatttttttacgatatactaaaagataatagcctagatctctaatctcatttttaataccgtaatgacgctctaagtcaatacgatctttcgctttacgctgcgcactagcacgctttccggagagatcgataattcgaacctcaccattttttataatgaagttaccacgatgggggtcgccagaaaccatgccatgttgatgtaaggcattaatactttgctgaattttattttttagcgcatcatcaatatcgggcatatcacacaactctatgccatcaatatactcgatgatcatgatataagtatggacaaaacgtaaggttttccgttcagccaataaataaaagtcattgagtgtatttaacccttcatttcgtactttttgggtttgctcaaaaaggcgttcgtaataatcaccttttaacagagacttaaagaaacgttcgttacgcttaactttcggagaaaaaaccttaagaatcaatttaccgtaatcggtatcaataagcataacttttgtatcatcaatagaacgaaaaaccttgatgatatttatattataagacaagaagtcatttaatacattgaggtacttactattgttttcatcggtaaaaacaaccaagtctttgatcttgctcttctgaatcataataaaccagttaaatgttatttacggtaatattttcggcaaagataacagactcctgctataattcctgagatataatgatgttgcactaaaagatgtttatatcttttttaaattcaataattgatttcgcatctcgtggagagtcatctttccagggggaattttctaaagctattttatagtattttaccgatggataaattgcccatttgtgccacggtttagttgcacctgtataatgaataagaagagtactttctgtaatcagctttttatagttttgatgtgttttgtcttttaattcacttttaattgtataaattgtattgtactcacgaggcaaaaataatgtcatccctttcagtaagacattcataacatcctgatcagggtatttataaacattatctttactcataagaatagacaacgctttttctgttagttttgcgtcagcccattttcttaagtctaaataaacgacaccggaattaaagtactgcccaagtaattcaggatcagacaacctggataccgccttttcttgcattggctcaacatctttaacaacagcagcaaccgctccatttaaacccagatgtaatagttggctaatatcgcctttacaaacaacatctgcatcaagataaagcaaacgatcaagcgttaaacccaataattgaaatgcaaataaacggaagtacattgctcttgaccagacctgtgtacaaggcaagcactggagcttatcagtgttaattctatataacgtgattcttaattggttttgctctgcaagctttgcaattttttgaaaaaaaccatcattataaacatcagcaataatataaaaatcaagattaatatgtcgattatttaggacaattgatgtgatggaaacacctacaccatcaagataattagcatcgacaccataggcaacatttaaacattcagaagtatttatattagctagccgaaaatcccaggctttaactttatctatctctatggcaggaaatgagtccacaatgctacccttatatcattactttatagtttcccagttttaatgctttatcttttcaataaaataaaaaagatagttgctaaatccttttagatatctatgctttttaagcatatgttttgcgctatatcttaattgattgctattgttcggtttcagcaacgccgtattcttccatgggctagcattttttgcctccataaaggcttgacttacaggataatcccaggcccaatcatgccagggcttggttggcccgatataatggataaaaatagtatcgttggttactgggtttataaagctttctttgagttgataatttaagctgaactgggtgttatatttaatatcagcgaaaataagtttatccgccagcaacatatttaacacatcctgatcaggatgtgttatttttttgattatttctggctcatttagcattgcaatagctcgtgcagaaacctgctgagccgcccattgggcagtattaatcaataaaaaaccggagttaaagtaacctttagcaattcccgcaacacctaagctatgggcgcgtttttcccaccagtcagcttgcccttctgtaacaaccattgcgactttatcgtcaggaaaactgaaattaattagtggctcaatagtcccctgacaaatgatatctgcatccagataaaggactttaggcgccttattaataaagtaatctgcaataacaaaacgaaaatatattgcatgagtccaattcttagtgctaggcaaactgcgcagtcgatcaccattaatcagatatattttaattctggttttatactgcaacgccagggcatcaaaatacttacgatcatcatcaccaaaataatcagtaaaaatatggaaacacaatcgacttccttcattatattttaatatactagcaatgctaattccgcaaccaaatagaaagtttttgtcagttccataagcgatgtccagacaaagattttctgtttctactttatgatcataatcaataacactattaagaaactcagtttcctggaaaaacacctgctgcattatttcctccgggaaatagcagaaataattaccttatgtaatctatcgtaatacttgctttggtaaaattcatcgatgctcgcaggaattttttcatgttcgatatgaatttcacctgctatatatttatttagaagagttacaaaaccagcaatatctcccggttgatacagatggccattgacatcaggttgaataatgtcagcaggcccggagacacaatcggcactgatacaaggaatcccccagctcaaggcttcaagtagggtcattgggaaaccttcaaaagaactcgtgagcaataacgcactcactttttcaatatcttgctggaccaattcccagggatattgttgccaaccataccagacaattcgatcatcaatatttaattctctaccataagcctggcatttttcgaaatcggagccatcacccaatacatggagtttccagttacctttcgcttgacttaagccatcaagcaggtctttaactcttttctggccttcaaatttcatacgcccaacataaataaacgttgccgtttcaccttcctcgggcgcgggaatgacactgtctttagtttcgacgggattaaaaataacatttatcgtgctttctgctacacctcgattaatcatttgctgtttaatgccagagctgattgctaaatgatagtcggcacaggtgatatattcagcatgttttttgtgatctaaagaaaaatgtggccaactaaatactggcatatcaattccactttttttacgtgcttttgcggcaaacaggcaggagatcacatcaatacaaataacgatatctggttggtactcctgaagccatttacttagagcatgaatatgtttcgcccgacgcaaaaaacctaaacgaatattggaaaaactacaactgtatttaataccttccagccatcccttatccattttgtcattacgacaaaagaaaaacatttcactttggatatgttgttgcctgaaggtagtaataacatcacggatgacagtttccatgccgccaaatccagaaacagcttcgccgataaacgctattttcatagaaactctcattaattgagtaaaactcactgttttaacggttttatttgtctataaaatcagaaacaatcgtactcatcattttatctggactgaatttatataaactatcataatccattggtttaacagaactgttaataaaatactctaacttatcccaatcatcatgacctattataaaaaagcgagattcactatagatttcactaccaaatacatttatattattagtaattaattttttattgaaaaatagtgcctcaagtatacgaagagtccagccagattggttttctttggttatatcaacaattatattagcatttaatgttcttctaatattctcttcataagatatttgtttttcaatcaaatacttactagtcgtagaacttgtcttatctttgacaacattaaaatctagcttacatcctagtgttgttaatctctcggctaactcattaattatttgaagacgccctttatcacgaccaaggaaaaaacatattggctggctgttatttttgtcagataaactataatttctaatttcatccattcctataggaaaaaattgttctattgccttgatcttttcattccctataaatctatgctcaaaatcatatataatatcgaaataattcgcgttatcaagaataaaatcttcgccaacagtatttcttagaagcaaaactttatgacagttaatattttttaatatttgtttattgatacctttattaacaacactgtcattaatgataattatgtcatcttttttaatatcattgaggtaatgcttgatgaataatcgccccagccatgcattatccatccctattttacttatttttttattaatccagttatatttttttggtgttgttatattttttatcttgtacttttttttcaggtactgaatcatttttaattcataatctgcaacccaatttataaaataaatagtcataataaagttagttccagtacatactaataaatatttttataatcctttgcgttgtgttcgctctttaatacgctcggccttaacgcttgccatgttcaataaattctgttcaagagacaatattttgcgtaaaggcatcccaaaataaaccttcataaatcgccagatatctctttgcgtcaggccaatattcatactactgaaatataaaccaatcaggtctttatcgcgccagcggcgcggtacttttgcacgtatctgtgcccgatgcagatcgataacactaatttttaattcatcttcccggccagtaaatggcaaatgaagcaaaaagtggcaaatgtaacagtcgcggtgatttatccctgcagtatgcattttacgcaccatagttgctacacgtgcgatcagcatacgcttaacacgtatatcaggcgggttgactgcccaatcggcacaataatcttcaaggctaattgtgggagtgagatcttcggtaataataaaacttgcgcgagttaatggatttaaccctttttcgccaaacccaatgcccttcattgtatcaacgccaacatcactcaggcgatgaatagcgtgccactctctgtctgcgcccaaaacgggcatccgcaaactgagtagattttttataatctcttttaatgtcgtccccttgtgccatttaagaaaatagcttttcccggacagttcaaagcgtaatgtacgacgagtctccagttcacgaaagacctcgccgttcagttttttgacctctgcaaaagcatctttaccacgccaaagtgtggcaagcggctcttttaattcaaccatctaaaccacctgtaatgatatccgcggctttttctggcaagctatacaaatcctgagtatcggcataatggcgagcattctccgcccaggccattcgcaatgggctctgagttaacgctttacgtaaaacttcatttaattgttcctgagagaaaggttcagcgatgaccgttccacaattggcatccgcaatataatgcgcgtacccacataccgctgttgttaaaacaggtaacccagcagtgatcgcttctagaagaacgatacccgcggcttcctgataagcgggatgcagtaataaatcagcggctgccattaattcactcacatcattgcgaccgaagaagaaatgcacattgctccgcacgccgagtttttctgccagcgcttcaaattttcgcggcttatcctgaccaacaacaaataaaagcgtattgtgacgtaaactttccggtaagcttgccaaagcttcaatactgcgatctacacctttacggccaaaatcacttccaacctgcagtaataagttttgttgctcttttatgccatttttctggcgataaatttcacggctgtttgggatttgctcactgtattttctgtccggataaataccgggaggaagaatttgaaaacgttcaggttcagtttgataatgcttctggaaatcggcgatttgcttatcggtcagcatcataagtttcgtgcttttaccctgctcgaaagtcgctcgctcaaatgcggcataatggcgatatcgacttgttaaacgatataaaaaacctttttcttgcgcaactttctcggcgtaacaaacatcagcggcaaaataaacatccaggccaggcatcttattaaacccaacaacgcgatctgcgggatgctctttgagatgattttgtacccaggcataatattctgcattgcgtccatggttggtatgggacttaactggcacctgaataagctcaaatgctttcgggcaatcgccttcccagctctgtgtatatacccgaacatggtggccccgtgcggcaactgtacttgcaatgcgcataaagtcacgttgaagcccaccaaatggaaaatatttatataaacaaaacgccacgatcataattgtgcattcctgtcagcactaggggcatcttctggcaacagcttttccgtagcggcgatcacatcctccgctgggataacagaaagatattttttgttgcggtcaagttcatgccgggtcggcattttctgataattccccgcccagaattgaataatattctcggtccagggacgccagaatacgtgatccgttgcaccaaatagactaatgactggcgttttcactgccgctgcaatatgtcccggcgcagaatccacaccaataaaaagcactgcatgatcaattaatgcacccagttcaggaaaacgtgttttacctgcaaggccagtaatgggttttgtttcgcaacctcgtgcaatctcatctacacaagcgagatcatctgcgctgggcccacaggttagcacaacctgatagcctcgctgttgcagcgcatcgataaccttagaaaatttatcgttatcccaacacttaaatatctgacgcgctgtcggttggatgacaacataatgatcttttacgcccagggcatctaattcccggcgcatcttcttccagcaatcttcggcgtaactcattgttgtgtcggtgtagaaatcggtaatacctaatggctcaaggacgcttaaattacgctcaacaatatgtgtaccgtgtattggcgctaagtgtgtgaagctttttttccaaataccatgctgccgatgaccataaagttggcttattttcatccgtgcaggtaaacaacgtaccagcagcgccaccatccactgatccgtaagattaatgaccaggtcataattattcgcacgcagagtttttatcaagctaagcacatttttaattttatcgaaagttcccgcacctttattgcttatcccatagagcgcattaatttccgggttttcagacaaaatagggatggtgtcctgataaagcagcatatcgatttttgcatcaggataattctgcttgagcgtactgatgacaggagtagttaataacatatccccatgatatcgcatctttatgaccaggatttttcgaaatggcttttccactagcgactcttttgtgtgattgtctggttaagttaagcagaaaaaagcacgctaccgccccaggctcaacagctacctgaatactgataacgcacttactttgacgtgctagtgtatcatttctttcgcagcaatccgacccgaatgatttttatacacaaaatatactttaatcataaaaatcaaatagataaaaaatagcatttcgataatgtcagtacggcctatgtagatttgaaaatggggccgagtttcaatgaatcgcataaaaatacaaaaaaaatgaagatgtagcggcagatcagaccaaactgaagctatttaagtcaaaaacgggaaaagtaatggtaaagccacagctaaatacatagaatccccagcacatccataagtcagctatttactatgctcgaattgctttacaccgcccttctctaccttattcagccgctgatctggatacggctctgggtgcgcggacgtaaggctccggcctatcgaaaacgctggggtgaacgttacggtttttaccgccatccgctaaaaccaggcggcattatgctgcactccgtctccgtcggtgaaactctggcggcaatcccgttggtgcgcgcgctgcgtcatcgttatcctgatttaccgattaccgtaacaaccatgacgccaaccggtagcgagcgcgtacaaagcgctttcgggaaggatgttcagcacgtttatctgccgtatgatctgcccgatgcactcaaccgtttcctgaataaagtcgaccctaaactggtgttgattatggaaaccgaactatggcctaacctgattgcggcgctacataaacgtaaaattccgctggtgatcgctaacgcgcgactctctgcccgcagcgccgcaggttatgccaaactgggtaaattcgtccgtcgcttgctgcgtcgtattacgctgattgctgcgcaaaatgaagaagatggtgcacgttttgtggcgctgggcgcaaaaaataatcaggtgaccgttaccggtagcctgaaattcgatatttctgtaacgccgcagttggctgctaaagccgtgacgctgcgccgccagtgggcaccacaccgcccggtatggattgccaccagcactcacgaaggcgaagagagtgtggtgatcgccgcacatcaggcattgttacagcaattcccgaatttattgctcatcctggtaccccgtcatccggaacgcttcccggatgcgattaaccttgtccgccaggctggactaagctatatcacacgctctagtggggaagtcccctccaccagcacgcaggttgtggttggcgatacgatgggcgagttgatgttactgtatggcattgccgatctcgcctttgttggcggtagtctggttgaacgtggtgggcataatccgctggaagctgccgcacacgctattccggtattgatggggccgcatacttttaactttaaagacatttgcgcgcggctggagcaggcaagcgggctgattaccgttaccgatgccactacgcttgcaaaagaggtttcctctttactcaccgacgccgattaccgtagtttctatggccgtcatgccgttgaagtactgtatcaaaaccagggcgcgctacagcgtctgcttcaactgctggaaccttacctgccaccgaaaacgcattgaggttgttatgcaaaaacgggcgatttatccgggtactttcgatcccattaccaatggtcatatcgatatcgtgacgcgcgccacgcagatgttcgatcacgttattctggcgattgccgccagccccagtaaaaaaccgatgtttaccctggaagagcgtgtggcactggcacagcaggcaaccgcgcatctggggaacgtggaagtggtcgggtttagtgatttaatggcgaacttcgcccgtaatcaacacgctacggtgctgattcgtggcctgcgtgcggtggcagattttgaatatgaaatgcagctggcgcatatgaatcgccacttaatgccggaactggaaagtgtgtttctgatgccgagcaaagagtggagctttatctctagtagcttggtgaaagaggtggcgcgccatcagggcgatgtcacccatttcctgccggagaatgtccatcaggcgctgatggcgaagttagcgtaacgtttatgccggatggtatgccatccggcgcgcatgaattacttctggcactgccgacaataaaacgttgcccgctgcgcatgtttagtcgccacaatcggcgtaccgcacacccgacacggctcaccttttcgcccgtaaacctgcaattcctgagcgaaatagcccggtttaccatcactttgcagaaaatctttcagcgttgtaccaccctgctcaatgctacgcagcaacaccgctttaatcacccgagctaacaattcacactctgccaggctcagactactcgccagccgatccggatggatccccgccgcaaacagactttcgctggcatagatattccctacccctaccaccagcttgttatccatcagccacggtttaatcgccgtttttttcttcgcgcacttctgatgcagatactcaccattgaaatcgtcgctaagcggctccggtccaagatgggtcagcacattatgcccttccagctctttggtccacagccaggcaccaaagcggcgcggatcggtgtagcgcagcactttgccgttgctcatcaccaaatccacatggtcatgcttttcagggggaagttcttctggaaggatgcgcaggctgccagacatccctaaatgaatgataatccagccctcaggcagctccagcagcagatatttagcccgccgctgcacgctaagcactggttggtcgcttaaacggtagatctcttcactaaccggccagcgcaagcgtccgttgcgcaccactgcatgaagaatggttgcaccaacgagatgcggttctatgccgcggcggctggtttcaacttcgggtaattcaggcatagcatctccaggaatgaacagatgcagtcaatatgggggcaagcagataacaaaaaaccccgccggagcgaggttttttgttacatcaaagcgagaattatttgattttcgcttctttgtagatcacgtgctggcgaacaactggatcgaattttttcagttccagtttttccggcttagtacgtttgttcttcgtagtggtatagaagtgaccagtaccagcagaagaaaccagcttgattttctcacgaatacctttagccatgatttatttcctctaagtacttagtacttttcgccacgggcacgcagttcagccagaactgtatcgatgccttttttatcgattacacgcatacctttagcagatacgcgcagggtgacaaaacgcttctcgctctcaacccagaaacggtgagagtgcaggttcggcaggaaacggcgtttagtcgcgttcagtgcgtgggaacggttgttaccggtcaccggacgcttgccagtaacttggcagactcgggacatgtctattctccaaaaatcaaattagctcgagcttcgtatggggtattggcgcctcgtcaggctttacagcccggtcatcgcagttctatgtgaactctcgattgccaggcccaaatgccaaacccgagattctcaaaggtggcgtagtatacgctgactcagcgatgtgctcaagtcccgaacagacaaagatcccgaaggatcgcgcatagcgggttaaatccagccgcgttcggcaaaagaaacatactctccacgcccaatcacgatatggtcgagcacgcgtaaatccatgaactgacaactctttattatccgttcagtaatgagtttatccgctttactgggttcagcacaaccgctagggtgattatgtgcaaggatcagcgcgctggcgtttatttttatcgcttcgcggataatttcccgaggatggacttcaacatggtttagcgtgccggaaaaaagacgcctatgcgttataacccggtgttgggagtcgagaaagatcaccataaagatctcccgctcctcacccgtgagctggctttgtaaaaattccctcgtcatctccgggctgagtaaagggctttcttcacgcatccgcacgttgtagtaacgccgcgccagttcagcaatcccctttaactgggcaaatttcgccacgccaattccatgaacgccactaaattgttcatattcagaggttaacaagccataaagagagccgaaattctccagcatctcttttgccagggttaatacatctttaccgcgcgttccggtacgcagaaatagcgccagcagctcgacatccgttaaggcgctaataccaaacttcagcattttttcgcgcggcatcaacagctgactattgtttttcaccttcacctcctttgtggtgctcgcatcctgtcatagccgtttcgttaaatcgacggccagttttcaatcctggaaagcgcctcgcaaagtgaatctcaggtgaaggcacgacaacaaaagtattgtgataaaatcgccaacttctggtgtcaccctacaggaaaaatcatcatgagcctggccggtaaaaaaatcgttctcggcgttagcggcggtattgctgcctataaaacccctgaactggtgcgtcgtttgcgcgatcgcggggccgacgtccgcgtagccatgaccgaagcggcaaaagcctttatcaccccacttagcttgcaggcggtttctggttatcccgtttccgacagtctgctggacccggcagccgaagccgctatgggccatattgagctgggtaaatgggctgatttagtgattctcgcccctgccacggcagatttgattgcccgtgttgctgccggaatggcgaatgacctggtaagcacgatttgtctggctacacctgcgcctgtagccgtgctccccgccatgaaccagcagatgtaccgtgccgctgccacgcagcataatttagaggtgcttgcttcccgtggtttgctcatctgggggccagacagtggcagtcaggcttgtggtgatatcggtcctgggcgaatgctcgatccgttaaccattgtggatatggcggtagcgcattttagccccgtcaacgacctgaaacatctgaacattatgattaccgccggcccgacgcgtgaaccgctcgatccggtgcgttatatctctaatcacagctccggcaagatgggttttgctatcgccgccgccgctgcccgtcgtggcgcgaacgtcacgctggtaagtggtccggttagtctaccgacgccaccgtttgttaaacgtgttgatgtgatgaccgcgctggaaatggaagccgccgtgaatgcttctgtacagcagcaaaatatttttatcggctgcgccgccgtggcggattatcgcgcagctaccgtggccccagagaaaatcaaaaagcaggccacgcagggtgatgaattaacaataaaaatggttaaaaaccccgatatcgtcgcaggcgttgccgcactaaaagaccatcgaccctacgtcgttggatttgccgccgaaacaaataatgtggaagaatacgcccggcaaaaacgtatccgtaaaaaccttgatctgatctgcgcgaacgatgtttcccagccaactcaaggatttaacagcgacaacaacgcattacaccttttctggcaggacggagataaagtcttaccgcttgagcgcaaagagctccttggccaattattactcgacgagatcgtgacccgttatgatgaaaaaaatcgacgttaagattctggacccgcgcgttgggaaggaatttccgctcccgacttatgccacctctggctctgccggacttgacctgcgtgcctgtctcaacgacgccgtagaactggctccgggtgacactacgctggttccgaccgggctggcgattcatattgccgatcctagtctggcggcaatgatgctgccgcgctccggattgggacataagcacggtatcgtgcttggtaacctggtaggattgatcgattctgactatcagggccagttgatgatttccgtgtggaaccgtggtcaggacagcttcaccattcaacctggcgaacgcatcgcccagatgatttttgttccggtagtacaggctgaatttaatctggtggaagatttcgacgccaccgaccgcggtgaaggcggctttggtcactctggtcgtcagtaacacatacgcatccgaataacgtcataacatagccgcaaacatttcgtttgcggtcatagcgtgggtgccgcctggcaagtgcttattttcaggggtattttgtaacatggcagaaaaacaaactgcgaaaaggaaccgtcgcgaggaaatacttcagtctctggcgctgatgctggaatccagcgatggaagccaacgtatcacgacggcaaaactggccgcctctgtcggcgtttccgaagcggcactgtatcgccacttccccagtaagacccgcatgttcgatagcctgattgagtttatcgaagatagcctgattactcgcatcaacctgattctgaaagatgagaaagacaccacagcgcgcctgcgtctgattgtgttgctgcttctcggttttggtgagcgtaatcctggcctgacccgcatcctcactggtcatgcgctaatgtttgaacaggatcgcctgcaagggcgcatcaaccagctgttcgagcgtattgaagcgcagctgcgccaggtattgcgtgaaaagagaatgcgtgagggtgaaggttacaccaccgatgaaaccctgctggcaagccagatcctggccttctgtgaaggtatgctgagtcgttttgtccgcagcgaatttaaataccgcccgacggatgattttgacgcccgctggccgctaattgcggcacagttgcagtaatatgacgccggatgacttttcatccggcgagtttctttaaacgccaaactcttcgcgataggccttaaccgccgccagatgttccgccatttccggcttctcttccaggtaagcaatcaggtctttcagggtgatgatagagatcactttgcagttgtaatcacgctcaacttcctgaatcgcgctaatctcgccgcgcccgcgttcctgacgatcgaggctaatcaacacgccagcaagcgtcgcgccattggcctgaataatctccatgctctcgcgaatcgccgttccggcggtgatcacatcatctaccagcattacgcgtccttgtaacgcgctaccaaccagattgccgccttcaccgtggtcttttgcttctttgcggttaaagcagtacggcaggtccaggtcgtgatgctccgccagtgccacagcggttgtggtggcaatcgggatccctttgtaagcagggccaaacagcagatcgaactcaatgccggaatccaccaacgcttcagcgtaaaaacggcctaacagtgccagatcgcgcccggtattaaacagcccggcgttgaagaaataggggcttttgcgcccggatttcagcgtaaactcgccaaactttaacacctgcttgctaagcgcaaattcaataaactggcgctgatatggtttcatgccttcgctcctcatcttacttttctacagacaaaaaaaaggcgactcatcagtcgccttaaaaatcagtttgccagcgccgccttctgcgtcgttacaatggattgctttcccctcgggccagagccaacaagatgagtagctcttcatgggtgaacggctcgccttctgccgtcccctgcacttcaatgatgcgcccgtcttcggtcatcactacgttcatgtcggtctctgcggcagagtcttcaacgtattccagatcgcaaaccgcttcgccgttcacaattccgacagaaactgcggctaccatccctttcatcggattggttttcagcttgccgttttccaccagcttctgtagcgcatctaccagcgccacgcaggcacccgtaatgctcgcggtacgcgtgccaccatcagcctgaagcacgtcgcagtccagcgtaatggtgaactcacccagcgctttcaaatctactgccgcgcgaagagcacgggcgatcagacgctggatttccattgtgcgtccaccctgcttacctttcgccgcttcacgagcgttacgggtgtgggtagaacgtggcagcatgccgtactctgcggtgatccagccctggccctgacctttcaggaagcgcggcacgccttcttcaatagaggcggtacacaacactttggtatcgccaaattcgaccagcacgctgccttctgcatgttttgtatagttacgagtcagggtaacgggacgcacctgattattgctacggcctgctggacgcatattgaaatctccggcttgaaacaaatgtggctgcgcattatacggacttccggcggttattcctatcctgacaaggcatcgatggctataatccttccacctctccttttataaacaggaacgtctatgatccgcagtatgaccgcctacgcccggcgtgaaatcaagggtgaatgggggagcgcaacctgggaaatgcgcagcgtaaaccagcgttatctggaaacttactttcgtctgccggagcagttccgtagccttgaacctgtcgttcgcgagcgtattcgttctcgcctgacgcgcggtaaagtggaatgtaccctgcgctatgagccagatgttagcgcgcaaggtgagctgatcctcaacgaaaaactggctaaacagctggtaactgccgcgaactgggtaaaaatgcagagtgacgaaggggaaatcaacccggttgatattctacgctggccgggcgtgatggcagcccaggagcaggatcttgacgccattgccgctgaaattctcgcggcgctggatggtacgctggacgactttattgtcgcgcgcgaaaccgaaggtcaggcactgaaagcattgatcgagcagcgtctggaaggcgtcaccgccgaagtggtcaaagtccgctcccatatgccggaaatcctgcaatggcagcgtgagcgtctggtcgcgaagctggaagatgctcaggtgcaactggaaaacaaccgtctggagcaggaactggttctgctggcacaacgaattgacgttgccgaagaactggatcgcctcgaagcgcatgtcaaagagacctacaacattctgaagaaaaaagaagcggttggtcgtcgtctggattttatgatgcaggagttcaaccgcgagagcaacactcttgcgagcaagtctatcaatgccgaagtgacaaactccgccatcgagctgaaagtgttgattgagcagatgcgcgagcagattcagaacatcgaataactcgtaacgccaattcttacttttccgccttcacaaatgccgccactcaaacagagcggcatttttcttccccgcaacattcaattctgttttgcgtgcctgctccagattttgcgatgtttttttgcccagcacactgagaacgcgagatactcacaactgtatataaatacagttacagatttactttctttgcaattgatatcacatggagtgggcaatgaacgaacatcatcaaccttttgaagagataaaactgattaatgcaaacggagcagaacaatggagtgcaagacaacttgggaaactactgggttatagtgagtatcgtcactttatacctgtattaacgcgcgccaaagaagcctgtgagaacagtggtcacacaattgatgaccatttcgaggagatcctcgatatggtcaaaattggcagtaatgccaaaagagcattaaaagacatcgtactctcccgctatgcctgttacctggtagtacaaaacggcgaccctgcgaaaccggtcattgcggcagggcagacttattttgctatccagacccgacggcaggagcttgctgacgatgaagcatttaagcaacttcgtgaagacgaaaagcgtctgtttctgagaaatgagttgaaagaacataacaaacaattggttgaggcagcacagcaagctggggtagcgacagctactgatttcgccatatttcagaatcatggttaccaggggctgtatggtggattagatcagaaagctattcatcagcggaaggggctgaaaaagaatcagaagatcctggatcatatgggtagtacagaactggcggctaatctctttcgagctacccaaacagaagaaaaactcaagcgggatggcgtgaatagtaaacagcaagcaaacaccacacactttgacgtgggtcgcaaggtgaggcaaaccattcaggaacttggcggaaccatgcctgaggagttgccgaccccgcaggtcagcatcaagcagttggaaaacagtgtaaaaattacagagaagaaataacagaaactaaaaactctttttgttgattgagacacccgatgcgtaagccaaggtccaggtgcagtgaacacaatggctaaatattgcacctttcttttccccctcagttttaacctattttttcttatgcattttctcagacaagaagtcagaagaatgcatctctgctacagaaaatagcgatttcacataactacaagttatcaatttcccctccccttaaaaaatctcaatcgtgacaatgcgcacaaatcgctaccctgccagacagatttttagggagagaaccatgctgttatacattttgtatttggttggcattactgccgaagccatgacgggggcgctggcggccggacgacggcgcatggatacatttggcgtaattattattgcgaccgccaccgcaattggcggagggagtgtgcgcgatattctgctgggccactatccgctcggctgggtcaaacacccggaatatgtgattatcgtcgctaccgccgcagtactcaccactatcgttgctcctgtaatgccttacctgcgcaaagtgtttctggtgctcgatgcgctcggactggtggtcttttctatcatcggggcacaggttgcactggatatggggcacggcccaattattgccgttgtcgcggcggtaaccaccggcgtgtttggcggcgttttgcgcgatatgttctgtaaacgtatcccactggtattccagaaagagttgtatgccggtgtcagttttgcctccgccgtgctgtacatcgcgctgcaacactatgtttctaaccatgatgtggtaattatctccaccctggtattcggcttttttgcccgcttactggcgctacgccttaagctgggattaccggtcttttactacagccacgaaggacattaaggttcaaaacctgtgatctgctgggcagccagccaactgcccagcttcttgatttgcgcattttccttccattcaataacctgtctggcgcgtccgcttccagtccccggcagctgctgccagaactgctccgtgctaaataaaagttggctccaggaccgttcatcactggcattaagcgccgcccgggttagcggtattcccattgccatcacccagcgagtaaaaggctgcttacgagccagattaaactgatgccatagctgcgcacttttacttttcgcgatccccggcgtgttctgtaattgctctggcgttaataaaagccaggaaaagatatgttcaaagcgatgagtctgatgcagcgcgcgccaaccggcctcaccaatgccatccagcccaagaacctgttttgcccccagccagactaagcgactaatgaactgttcctgacaaacatcagaagcaaagtagcaggtcaagctgttaaagcggttttctggcggtgtcggttttgtacgttctgcaccgcgccacaccacatcatcaatgcgaggaataccctgaccggcaaggctgacgagaatctgatcaccaggcgcaatatcccactcctgccagcgcctgacggaaccaatattcacccgctggacttttttatcatccagcatgacaggtgcgagactcgcaaccacgcttattttaccgctcttacccaccgcaaactgaattgccttcacttcggcaacctgagctacaggttgatatttccaggccaccagccactctgcctggcccggtagccaatggcgggattctggctctttcgccgctcgtacaactacgccatcggtgacgaagggtaattccgctttccaccactcattgcgtacgcgcgcaacttcatcagcatttttcaccgcacgggtatacgtctgcgttagagtaaaacctgcggtagccagctcttttaaacgatcagacattaactgcggtccatccggccatgcccagacaaaaacgcccagagaattcagcgtgtcgctatcgtcctggcgcatcatcaagccagcaacttttgcgcgggcatttattccccccatttgttgttggatatgcccctcgcgctggagaaatatttccccctgaagcgtactgttggctaaaggcccgctaacggtttgcggcacagcggaaattaagctaactttctgcgtccagtcctcgcctttcaggccattaccgcgactgattgctttgttcagtttcccgtcccgataaaccagggttaccgcaacgccatcaacttttggctgcacccaaagatcgctacgttctcgcatccacagacttaatgcgtttttatccaccattttgcgtacacccgtatgggcaaccggatgcataaccgcaccatttaaaggcggcatcatcacgtcgcggggctcgctcccaaagcagcgttgccactgcgtaagacgggcgcttaactgatcgtaaacaccgtcttccacctcactttttccttccttccagtagtcatcgtcccactgttttatttgctgttgcaggcgggaaatttcttcctgtgctctggctgggctccaggccggacagaccgcccacacagaactttgccagcacaagatacctattaatatcgccatccatactttcatcatcacctccgctgtagatagtcaggcagatatacaacgtgatgaaagcaaagccgagtggcaaaaacggagtctgcgaggacgcttcctgaaaatcgtctttattgcagtgaatgacaggcaaatgcggaagcagctacgcaaaacgcaacaactttgcgcaaaaagtgtgagcaagggctacgtcacatggccgcgccgtgtataataagctcgtatgtaggctttatttcgctaatcacatacgaaagatactcatggctcaaggcacgctttatattgtttccgcccccagtggcgcgggtaaatccagcctgattcaggctttattaaaaacccaaccgttgtgtgacacccaggtttctgttagtcacaccacacgccaaccgcgtcctggtgaagtccacggtgaacattatttctttgttaatcatgatgaatttaaagaaatgattagcagagatgcgttcctcgaacacgcagaagtttttggtaattactatggcactagccgtgaggccattgagcaagtactggcgaccggtgtcgatgtttttctcgatatcgactggcagggcgcgcagcaaattcgccagaagatgccgcacgcgcggagtatctttattttaccgccgtccaaaattgaactggaccgccgtctacgcggtcgcggtcaggacagcgaagaggtcattgcaaagcgtatggcgcaagctgttgcagaaatgagccattacgccgaatatgattatctgattgtgaatgatgacttcgataccgcgttgaccgatttgaagaccattattcgcgccgaacgtctgcgcatgagccgccaaaagcagcgtcatgacgctttaatcagcaaattgttggcagactgaacctgatttcagtatcatgcccagtcatttcttcacctgtggagctttttaagtatggcacgcgtaactgttcaggacgctgtagagaaaattggtaaccgttttgacctggtactggtcgccgcgcgtcgcgctcgtcagatgcaggtaggcggaaaggatccgctggtaccggaagaaaacgataaaaccactgtaatcgcgctgcgcgaaatcgaagaaggtctgatcaacaaccagatcctcgacgttcgcgaacgccaggaacagcaagagcaggaagccgctgaattacaagccgttaccgctattgctgaaggtcgtcgttaatcacaaagcgggtcgcccttgtatctgtttgaaagcctgaatcaactgattcaaacctacctgccggaagaccaaatcaagcgtctgcggcaggcgtatctcgttgcacgtgatgctcacgaggggcaaacacgtagtagcggtgaaccctatatcacgcacccggtagcggttgcctgcattctggccgagatgaaactcgactatgaaacgctgatggcggcgctgctgcatgacgtgattgaagatactcccgccacctaccaggatatggaacagctttttggtaaaagcgtcgccgagctggtagagggggtgagcaaacttgataaactcaagttccgcgataagaaagaggcgcaggccgaaaactttcgcaagatgattatggcgatggtgcaggatatccgcgtcatcctcatcaaacttgccgaccgtacccacaacatgcgcacgctgggcagtcttcgcccggacaaacgtcgccgcatcgcccgtgaaactctcgaaatttatagcccgctggcgcaccgtttaggtatccaccacattaaaaccgaactcgaagagctgggttttgaggcgctgtatcccaaccgttatcgcgtaatcaaagaagtggtgaaagccgcgcgcggcaaccgtaaagagatgatccagaagattctttctgaaatcgaagggcgtttgcaggaagcgggaataccgtgccgcgtcagtggtcgcgagaagcatctttatagcatttactgcaaaatggtgctcaaagagcagcgttttcacagcatcatggacatctacgctttccgcgtgatcgtcaatgattctgacacctgttatcgcgtgctgggccagatgcacagcctgtacaagccgcgtccgggccgcgtgaaagactatatcgccattccaaaagcgaacggctatcagtctttgcacaccagcatgatcggcccgcacggtgtgccggttgaggtccagatccgtaccgaagatatggaccagatggcggagatgggtgttgccgcgcactgggcttataaagagcacggcgaaaccagtactaccgcacaaatccgcgcccagcgctggatgcaaagcctgctggagctgcaacagagcgccggtagtagctttgaatttatcgagagcgttaaatccgatctcttcccggatgagatttacgttttcacaccggaagggcgcattgtcgagctgcctgccggtgcaacgcccgtcgacttcgcttatgcagtgcataccgatatcggtcatgcctgcgtgggcgcacgcgttgaccgccagccttacccgctgagccagccgcttaccagcggtcaaaccgttgaaatcattaccgctccgggcgctcgcccgaatgccgcttggctgaactttgtcgttagcagcaaagcgcgcgccaaaattcgtcagttgctgaaaaacctcaagcgtgatgattctgtaagcctgggccgtcgtctgctcaaccatgctttgggtggtagccgtaagctgaatgaaatcccgcaggaaaatattcagcgcgagctggatcgcatgaagctggcaacgcttgacgatctgctggcagaaatcggacttggtaacgcaatgagcgtggtggtcgcgaaaaatctgcaacatggggacgcctccattccaccggcaacccaaagccacggacatctgcccattaaaggtgccgatggcgtgctgatcacctttgcgaaatgctgccgccctattcctggcgacccgattatcgcccacgtcagccccggtaaaggtctggtgatccaccatgaatcctgccgtaatatccgtggctaccagaaagagccagagaagtttatggctgtggaatgggataaagagacggcgcaggagttcatcaccgaaatcaaggtggagatgttcaatcatcagggtgcgctggcaaacctgacggcggcaattaacaccacgactagcaatattcaaagtttgaatacggaagagaaagatggtcgcgtctacagcgcctttattcgtctgaccgctcgtgaccgtgtgcatctggcgaatatcatgcgcaaaatccgcgtgatgccagacgtgattaaagtcacccgaaaccgaaattaatgttttatgaacccaacacgttatgcacgcatctgcgaaatgctcgccaggcggcagcctgatctgaccgtctgcatggagcaggtccacaaacctcataacgtttctgcgattattcgtaccgcagatgccgttggcgtacatgaagttcacgccgtctggcctggtagccgcatgcgcaccatggctagcgcagcggcgggtagtaacagctgggtacaggtgaaaacacaccgcaccattggcgatgccgtcgctcatctcaaaggccagggcatgcagattctggcaacccatctttctgataacgctgtcgatttccgcgaaattgattacactcgcccgacctgcattttgatgggacaggagaaaacgggcatcacgcaggaagcattggccctggcggatcaggacatcatcattccgatgatcggcatggtgcagagcctgaatgtttccgttgccagtgccctcattctttacgaagcccagcgtcagcggcaaaatgcaggcatgtacctgcgtgaaaacagcatgttgccggaagcagagcaacaacgcctgttgtttgaaggcggctatccggtgctggcgaaagtcgcaaaacgcaaaggcctgccttatccccacgtcaatcagcaaggcgagatcgaagctgatgccgactggtgggctactatgcaggctgcagggtaagtgccatgaaaggtcgcctgttagatgctgtcccactcagttccctaacgggcgttggcgcagcacttagtaacaaactggcgaaaatcaacctgcataccgtgcaggatctactcttacaccttcccctgcgctacgaagatcgcacccatctctaccccatcggagaactactgccgggcgtttatgccacggtggaaggcgaagtgctgaactgcaatatctccttcggcggtcggcggatgatgacctgccagatcagcgacggttccggcatcctcaccatgcgctttttcaatttcagcgcggcaatgaaaaatagcctggcggcgggccgccgtgtactggcttatggcgaagcaaagcgcggtaaatatggtgcggagatgatccacccggaataccgcgtgcagggcgatctcagcacgccagaattacaggaaacgctcacgccggtttatccaacaacggaaggcgtaaagcaggccacgctgcgtaaattaaccgaccaggcgctggatctgctcgacacctgcgccattgaagaactcctgccgccggaactgagtcaaggaatgatgacgctaccggaagcgttgcgcactttgcaccgcccgccaccgacgctacagcttagcgatctggaaaccgggcagcatccggcgcaacgtcgtctgattctggaagaactgctggcgcacaacctcagcatgttagccttacgtgccggagcacagcgttttcatgcccagccgctgagcgccaatgacacgctgaaaaataaactcctcgccgccttaccgttcaagccaacgggcgcacaggcacgcgtagtggcggagatcgagcgcgatatggcgctggatgtgccgatgatgcgtctggtgcagggcgatgtaggttccggtaaaacgctggtcgccgccctcgccgcgttgcgtgcgattgcccacggcaaacaggtagcattgatggcaccaaccgaattactcgccgagcagcacgccaataacttccgcaactggtttgcaccgctcggtatcgaagtgggctggctcgccggtaagcagaaaggtaaagcacggctggcacagcaggaagccatcgccagcggtcaggtgcagatgattgtcggtacacacgccatcttccaggaacaggtgcagtttaacggcctggcgctggtgattatcgacgaacagcatcgttttggcgtgcatcagcgtctggcattgtgggagaaaggccagcagcagggcttccatccgcatcagttgatcatgaccgccacgccgatcccccgcacgctggcaatgactgcgtatgccgatctcgataccagcgtgatagatgagctgccgccaggccgcacgccagtgactacggtcgctattcctgatacccgccgtaccgacatcattgaccgcgtgcaccacgcctgcataactgaaggtcgtcaggcatactgggtttgtacgttgattgaagagagcgaattgctggaagcgcaggcggcggaagctacctgggaagagttgaaactggcgctaccagagttgaacgttggcctggtacacgggcggatgaaacctgccgagaaacaggcggtgatggcgagctttaaacaaggtgagctacacctgctggttgccacaaccgttattgaagtcggcgttgatgtgcctaacgccagtctgatgattatcgaaaacccggagcgtctgggtctggcgcagttacaccagctgcgcgggcgcgtaggtcgtggcgcggtggcttctcactgcgtgctgctctacaaaacgccgctttctaaaacggcgcaaattcgcctgcaagtgctgcgcgacagtaacgacggttttgtgattgcgcaaaaagatctggagattcgcggccctggcgaattgttaggcacgcgtcagacgggtaatgctgaatttaaagtggcggatttactgcgcgatcaggcgatgatcccggaagttcagcgcctggcacgccatattcacgaacgttacccacaacaggcaaaagccctgatagaacgctggatgccggagacggaacgttacagcaatgcgtaaaaggcggcagtgagaagaccgccatttcaggttaccctaccttcctgccggatgcgattcatcaccctacaaattcaataaattatgaatcaatacgcaggcttgataagcgaagcgtatcaggcatttgtctttgttgcggcggcacttctaccgccgcttcatcggttaaccggcaaaaatcggcaacatcaaatacaacttaattaccagcgcattgacgatatcgataaagaacgcaccgaccatcggcaccaccaaaaacgccatgtggcccgggccaaagcgttcagtgatcgcctgcatgttggcgattgccgttggcgttgcaccgaggccaaaaccacagtgacccgcagccagcactgccgcatcgtagtttttgcccatcatgcgccaggtaacgaagatggcatacaacgccatgaagatggtctgtaccaccagaatcgccagcatcggcagcgccaggctagccagctcccacagtttcagccccatcaacgccatcgccaggaacaagctcaagcttacgttacccagcacggataccgcacgctcaaagacgcggtaaaagcccattatactcagaccgttgctcagaatcacgccaacaaacagtacacagacgaaggtcggcagttcaaaagcagtgccagccaaaagttgcgcaacaattttccccaccgtcaggcagatagcaatcagcgcgatagtttcaatcagcaccaagctggtgatcatgcgtcccacatccggcttttcaaacgccgtcgggacttcctggtcatccggaataccgttcggcgtggtggagtgtttcaccagatagcgcgccaccggaccgccaatcaagccgcccagcaccagaccgaacgttgcacaggccatcgccacttccgtcgcattggtgaagccataacgttcaatgaacaatttactccacgcagcgcccgtaccgtgaccgccggaaagagtaatagaaccggccaacagccccatcagcggatcaagccctaacaagctagccataccaatgccaatggcattttgcatcaccaacagaccaacaaccacaatcaagaagatgccaaccacacgcccaccggcacgcaaactggcaatgttggcgttcaggccaatggtggcgaagaaagccagcattaacggatcgcgcagggacatatcaaagttgacttcccagcccatgctttttttcagtactagtagcgccagcgccaccaacaaaccacccgcaacaggttccggtatggtgtatttcttcaaaaaggagacggaatggaccaacttacgcccgagcagcaacgtcagcgttgcggcaacaagcgttgctaaagtatcgagatgaaacatagttactcctttgtatccgcatcactctttcatactcgtcatacttcatcgcgcagtggcaacttcatgaactatgacgggtatcgagttatgctttcctgggtcaaattctcagctgttaatgaacaaatggcatggattttaagcagaaaaataccaaaagttatataaaaaagtgcatttatctcatttaaatatttagatgaggatgtggcaaacgtttgcttttctctttcggtcagctaaaatgcccgctttgctaccacgggattgttttcgatgtctgtttccaccctcgagagtgaaaatgcgcaaccggttgcgcagactcaaaacagcgaactgatttaccgtcttgaagatcgtccgccgcttcctcaaaccctgtttgccgcctgtcagcatctgctggcgatgttcgttgcggtgatcacgccagcgctattaatctgccaggcgctgggtttaccggcacaagacacgcaacacattattagtatgagcctgtttgcctccggtgtggcaagcattattcaaattaaggcctggggtccggttggctccgggctgttgtctattcagggcaccagcttcaactttgttgccccgctgattatgggcggtaccgcgctgaaaaccggtggtgctgatgttcctaccatgatggcggctttgttcggcacgttgatgctggcaagttgcaccgagatggtgatctcccgcgttctgcatctggcgcgccgcattattacgccgctggtttctggcgttgtggtgatgattatcggcctgagcctaattcaggttgggttaacgtccattggcggcggttacgcagccatgagcgataacaccttcggcgcaccgaaaaatctgctgctggcaggcgtggtcttagccttaattatcctgcttaaccgtcaacgtaacccttacttacgcgtggccagtctggtaattgcgatggcggccggatatgcgctggcgtggtttatgggcatgttgccagaaagcaacgaacctatgacgcaagaactgattatggtgccaacgccgctctattacggtcttggcattgaatggagtctgctgctgccgctgatgctggtctttatgatcactagcctggaaaccattggcgatatcacggcgacctctgacgtttccgaacagccagtgtccggtccgctgtacatgaaacgcctgaaaggcggcgtgctggcaaacggcctgaacagctttgttagcgcggtgtttaacaccttcccgaactcctgcttcgggcaaaacaacggagtgatccagttgactggtgttgccagccgctatgtcggttttgtcgtcgcgctgatgttgatcgtgctgggtctgttcccggcagtgagcggttttgtacaacacattccagaaccggttctgggcggcgcaacgcttgtaatgtttggcaccatcgccgcctccggtgtgcgtatcgtttctcgtgagccgctgaaccgtcgggcgattctgattatcgcgctgagcctggcggttggtctgggcgtgtctcagcagccgctgattttgcagtttgcccctgaatggctgaaaaacctgctctcctccgggatcgccgcgggcggtattactgccatcgtgctgaatctgattttcccaccagaaaaacagtaattcactggcggcggtaagataattaccgccgcagtctcacctctttaaccattcccgccttgaggattgcgcgtaaatcgtgcataactcccttatgtgcatttcacgggatggaagaccatgaaatttattgggaagctgcttctctacattctcatcgctctgttagtggcgatcgctggcctctattttcttctgcaaacccgctggggagcagaacatatcagcgcatgggtttccgagaatagcgactatcatctggccttcggggcgatggatcaccgtttttccgcgccatctcatatcgtgctggagaacgtcacgtttggtcgtgatggccagcccgcgaccctggtggccaaaagtgtcgacattgcgctaagcagtcggcaactgaccgaaccacgccatgtcgataccatcctgctggaaaacgggacgctgaatctcaccgaccagaccgcgccgctaccgttcaaagccgatcgtctgcaactgcgtgatatggcgtttaatagcccgaatagcgaatggaaactgagcgcgcagcgggtaaatggcggcgtagttccgtggagtccaaaagccggtaaagtgctgggtacgaaggcgcagattcagtttagtgccggaagccttagcctcaatgatgttcctgccaccaatgtactgattgaaggcagtattgataacgatcgcgttacgctgactaacctgggtgccgacatcgcccgcgggacattaaccggaaacgcgcagcgtaacgccgacggcagctggcaagtggaaaacctgcgcatggcggatatacgtctacaaagcgaaaaaagcctaaccgacttctttgcgccattacgctctgtcccgagcttgcagattggtcgcctggaagtgatcgatgctcgtttgcaaggtccggactgggcggtgaccgacctcgatctcagcttgcgcaacatgaccttcagtaaagatgactggcagacacaggaaggcaaactgagcatgaacgctagcgagttcatttatggtagcctgcatttatttgacccgattataaacacggaattttccccgcagggcgtagcgctgcgccagttcaccagccgctgggaagggggtatggtcagaacgagtgggaactggctgcgtgacgggaaaacgttgatccttgatgatgcggcaattgccgggctggaatataccttgccgaaaaactggcaacagttgtggatggaaacgacacccggttggttaaacagcctgcaactgaagagatttagcgccagccgcaatctgatcattgatatcgaccctgacttcccgtggcagctcaccgcgctcgatggttacggtgccaacctgacgctggttaccgatcataaatggggcgtctggagtggcagcgcgaatctgaatgccgccgccgcgacattcaatcgtgttgatgttcgtcgcccgagcctggcgctgaccgccaacagcagcacggtgaatatcagcgaactgagtgcatttactgaaaaaggcattctggaagccaccgccagtgttagtcaaacgccacaacgtcagacacatatcagcctgaatggacgcggtgtgccggtgaatattttgcaacagtggggatggcctgaattaccgttgactggcgacggcaatattcagcttaccgccagtggcgatattcaggccaatgtcccgttgaaacctacggttagcgggcaattgcatgccgtgaacgccgcaaagcagcaagtgactcaaaccatgaatgctggcatcgtttccagcggtgaagttacaagcacggagccggtgcggtaaacatcaatctcgccgggtacgactcagacgtacccggcattccatcaatagattacaacgtaattgtcagcgcattcccttgaggcttcaccaccagcccctgctcactttcagcctggctaccgtcttgcagaccatttactttcacaacattgcgcaggcacagtgtccagttcttcgcctcgcccgcaccagtcacagtaatcgtgttgccagtacgtgctgcttttaaagtaaagatcacgcttccgtcagcagcgggcacttcacagacggcttcatgcccgtcttgcagattgaagaggtggaatgccgtgccttcgtgccacacgtaatcgggacgttgatcgttgttgcccagcgccagtagagtgttatcacgcacataaacgggcagactcaggaagccgtgctgctgtttatgccagcgactaccgtcgagttcatcgttgtgccacaggtgtgtccagcgaccttccggcaggtagaactgcacatcgcccgcttcagtgaacaccggcgcaaccatcacgttgtcgcctaacatgtattgacggtcaaggtaatcacaagccggatcgtccgggaactccatcatcatggcccgcatcatcggcgtaccccgcgcgttcgcacgcgcagcttcacgatacagatacggcatcatgcggcatttcagttgcgtgaagaagcgcaccacatcacaggactcatcatcgtaggcccacggcacacgataagatttgctaccgtgtaaacggctatggctggagagcaaaccaaacgcgcaccagcgtttgtaaacgtgcgccggagcggtattttcaaagccgccgatatcgtggctccagaagccaaaaccactaaggccaatagacaaaccaccgcgcaggctttccgccatactttcgtagttagcgtaacaatcgccaccccagtgtaccgggaatttctgcgcaccgacggaggcgctgcgggcaaacaagacagcttcttcctcaccaacggtgtccttgagcacgttccacaccagttcgttgtagatgtacgcataatggttatgcattttctgcggatcggaaccgtcaaaccactgaacatcagttgggatacgttcgccaaagtcggtcttaaagcaatcaacgcccatcgcgaccagacctttcagtttgtcggcgtaccatttgcaggcatccggattggtaaagtcataaatcgccagacctggctgccatttatcccactgccataggctaccgtccgggcgtttgagtaaatagcctttctcttgtaactctttaaagacgggggatttttgaccgatataggggttaatccagacgcagattttcagtcctttcgctttcaggcggcggatcatcccttccgggtcagggaaagtcagcgggtcccactcaaaatcgcaccactggaaggctttcatccagaaacagtcaaagtggaaaacatgcagcggcagattgcgttccgccataccatcgataaagctgtttaccgtcgcttcgtcgtagttggtggtaaaactagtggttagccacaggccgaaggaccacgcgggcggcagcgccggacgaccagtaaagcgggtataacgatcaagtaccgctttcggcgtcgggccgtcgataacaaagtattcgagatattcactctcaacgctgaactgcactttggagactttctcgcttcccacttcaaaagagacacactggggatgattgaccagtaccccataaccacggttagtcatgtagaacgggatatttttatacgcctgttcagtacttgtgccgccgtcccggttccaggtctctaccgtctggccattgcgcaccagggcagtaaagcgctctcccagaccgtaaactgtttcgccaacgccaagatcaagccgctcaaacatataattgcgttgattattcgtgtcctgcacgtagccattatttttcacctgactaccggtaatacgttcgccgttgcgcagaaaatccagactccagaactcacctttgctgacacgcgcgcttaagttgccacttttaaactcagcataacgttctgtgttttcgattgtgaccttcacgtcctgcaaaatattgagcggataatgaggaccgttattcagcgccccctgaaaatgctcaatccgcacaccgacaataccttcctgtggggagaaaaagcgcaacgtaaataaaggcgtatcaagctgccaggtacgttcacgcacatcacggggggcagcatagaccaccatttcattatcctgctgttcaacctcgaacacctgaagcgggtgaatcaaattgaggccaggttgaatcaaccagtttccatcgctaattttcattgccgttccttagttctgcacttcttgagaggtgaattgttgctggcaacggcgtttaccctgagccagctgttccataacggttttcagattgtgcgtcgtgagactgtagtagcgtttagcgataatcgcgctcagcaaataacagatcgccggaacaatcgtgaatagcgcaataatgatgctaatcgtggcgctgttctgcgctttttctgccgcatcatatccgccataagccagcatccagccgataagagcgccgccgaaggccaaccccagtttgagcacaaacagcgtgccagcaaaactgatcccggtcaggcgtttaccattgcaccactcgccgtagtcgacggtatcggacatcattacccactggataggtgtcaccagttgatgcaacacaccaatcacgaagatgaagacaaacatagtgatgctggcctgcatgggaacaaagaacatcgcgaggctaatcactgccagcagggcgttcgtccaccagaagatagtgactttacatttccagtcggtcagaggttttgccagtgcggaaccaatcaggttacccacgcaataagtggtgagaaaagcgacaaacacttccggcgtgcccaaaatccatgtgacgtaatacatcatcgccccaccgcgtacgcacaccgccaggatattgaaaatggttagtaaaccgacaatccgccactggtcgttttgccagatatcacgtaaatcttcccgcatagacgttgttgtaggtggtgcttcaacgcgttctttagtggtgaagaaacaaaatgccagcatcatgaatgccaccacggaaaggaccgcgataccgccctggaaaccgagtggtttattatcaccgccaattaaattaaccagtggcatcatcagaacagtagaaagcatgcctcccgcggtcgccagcacaaaacgccaggattgcaggctgatacgctgagtcgggtcattggtgattacaccacccaatgcgcagtaagggatattgacgacggtataaagtaaggtaagtagggtgtaagtaattgctgcatagatcattttgccgttcatactgagatctggcgtgctataggccagtacacagacgatcccgaatggcagtgcgccaaacagtacccacggacgaaatttaccccagcgagagcgcgttcgatcggccaacaaccccatgcaaggatcggaaatcgcatccagtgcacgagcgaccaaaaacatggttccgacaaaaccggcaggaatgccaaaaatatcggtataaaagaacatcatatataacattacgttatcgaaaataatgtggctggcggcgtctcccatgccataaccaattttctctttaacggacaacacttcactcttcatctgcttttccttgatgctataggggtgctgagaccgataacgcattttgtaaaccatccctgtgagagcgaatattccgatatctggttattaatttatgattcttgttttatgtgatcgtggtagcgttaattccgctcatatatcattgtaaaatatgggttttatatgaactataatgctttcgtgataatacgctgcgtgtattaggcggaaaaaactgatctgggggatgtagaaactcaaggaagtagctataatgcgccccgcctccatgtagcaatcgaggcgcggaagatcgtcgtctccggtgaggcggctggacttcaaatccagttggggccgccagcggtcccgggcaggttcgactcctgtgatcttccgccaaaatgcctctcctgacgttctccaaccccttgtaatactgtcaatccagatattttctactgctcaatattcaatcggcttcaggaatacctggtctaaggttttgtgatggacgatgagcggctgaagaatccgcctgtcggttcttctgtcctcgaacgcatccgcgatattcacgccagtatgcgccgtgtttatttgcaggtgatttgcccccctgctgactctcagccaactgtatcgccattaaggtgaagatgttgttttactcgccccagaacacccttttttatacgactattctatttctttaaccgctggcgaaaaaaactgactataaacttcaccaataatcagactgccatcaagattaatttgttcatttaatatatcaaatcaacttgttttatttttactatcaaaaatagctcattgccttactataattaatatataaattcggtaattaattcttaacatgcttttactaataatctcaattgctggccctataatattgcgctagcattgctttctggttgtatcagcgatactcaaaaattcttaatacaatactcattcgactggtacttatttgtaactcagttatattttttcgcccggtgattcagaagaatgcaaaaaacggctaccactccaagtaaaatacttgatctcactgccgcggcatttttacttgtcgcctttctgacgggtattgcgggcgctcttcagactcctaccctaagtatattcctcgcagatgaactgaaagcccgtcctataatggtaggttttttcttcaccggtagcgctattatgggaattctggtcagtcaatttctggcaaggcactccgataaacaaggcgaccgtaaattactgattctgctatgttgcttatttggagtgctggcctgcacgctttttgcgtggaatcgcaactacttcattctcctcagtacgggcgtacttctgagtagttttgcttccaccgcaaacccgcaaatgttcgccctcgcccgtgaacacgccgacagaacaggccgtgagacggtcatgttcagtacatttttacgtgctcagatcagccttgcctgggttatcgggccaccgctcgcttatgaactggcaatgggatttagttttaaagtgatgtatctcaccgctgccatcgcatttgttgtttgcggactgatagtctggttgtttttgccaagtatacaaagaaatattcctgtcgttacccaacccgtagaaattttaccctccacccacaggaagcgggatacgcggctactttttgtggtctgtagtatgatgtgggcggcgaataatctctacatgataaatatgccgctatttattattgatgaactgcatctaaccgataaactgactggagaaatgattggtatcgctgccggtctggaaattccgatgatgttaatcgcaggctattacatgaaacgtattggcaagcgactattaatgctcattgctatcgtgagtggaatgtgtttttacgccagcgtactcatggcgacgactccggcggttgagctggaattgcaaattcttaatgccatcttccttggtattctctgtggtatcggcatgctttattttcaggacttgatgcctgaaaaaataggctctgcgacaacgttatatgcaaatactagtcgcgtcggctggattatcgccggctctgttgacggaattatggttgaaatctggagctaccatgcgttgttctggctggcgatagggatgttgggtattgcgatgatttgcctgctgtttattaaagatatttaactcaccagtctgggctaagaaaaatcggcgtggcgcaaacagagccatcctcgccatttttgctatcatgcctgcatacataaacgacaaaacagtatgcagagggaaaaatgggttccaccagaaaggggatgctgaacgttctgattgccgccgtgttgtggggaagtagtggggtctgcgcgcaatacatcatggagcaaagccagatgagcagccagtttttgactatgacgcgtttgatattcgccggtttgattctactgacgctgagttttgttcatggcgataaaatcttttctattattaacaatcataaagatgccattagcctgctgattttttccgtggttggcgcgctaactgtacagctcacttttttgctaaccatcgaaaaaagcaacgcagccacggcaacggtgctgcaattcctcagtccgacgattatcgtcgcctggttcagtctggtgcgtaaaagccgcccgggcattctggttttctgcgctattttgacaagcctggtcgggacttttttattggtgacacacggtaatccgacgagtttaagcatctctcctgccgcgttgttctggggcattgccagcgcatttgctgctgcattctataccacctatcccagtacgctaattgcccgctatggcacgttaccagtcgtcggctggagtatgctgattggcggtctgattctgttgcctttttatgccagacaaggaacaaactttgtcgttaacggcagtttgattctggcgtttttttatttggtggtcattggtacgtccctgacatttagtctgtacctgaaaggagcacaattaattggcggtccaaaagccagcattttgagctgtgcagaaccattaagtagcgcgctactctctttgctgttgctggggatcacgttcacattaccggactggctgggaacgctgctgattctgagtagcgtgattttgattagtatggattcccgtcgccgcgccagaaaaataaatcgtccggcgcggcataagtgagaattaccagccaggcaccgcgccaccgttaaaaatggtttctgccgctttagcgacttcgggactttgataagattgcagaaattccttcacgttttctgcattcttattatcttcccgtgccaccaaaatattcacatacgggctattcttatcttcaataaatacgctgtcgtgcaccggagaaagcccggtctgctgaatgtaagtggtgctgataatcgctacatcaactttgggatcatccagtacgcgcgggagctgcgccccctcgagttccataatctgcaaatgacgaggattatcggttatatccagcgcggtaggtaataacccttttccctctttcagagtaattagcttctctttttgcaacagtaaaagtgcgcgaccaaggttggtcgggtcgttggggatcgccactgtcgcgccttcttttatttgcgccacggttttgatttttttggaataacccgccatagggaagacaaacgtatttcccaccgctaccagtttataaccatgcgcctgattatcttgttcaagaaagggtcgatgctggaagacattcgcatcaagttcgccatgatttgtcgcatcgttcggtagcaagctaccgctaaatcctaccagttcaacatcgaggccatatttctcttttgccacctttttagcgacttccgcgacatcttgttctgcgccatttataacgccaactttaatgtgttttgcatcgctgctactctggtcgcaacctgccagcagaattccggccagcaataatgcggcccctgtccgtagatgatgtgttgtcagtttcatttttttatccttttattaatgattacctgactatagcggtaaggtcgctgcggtttaaaaaacgaaacgctatcgataagaataaaaaggaataaaagtggaatataaagtctggcacttcttactgaccacgcaagcgcgtttcgtacagcatgatgagagcgatgaaagcaaactacacttatgcttcattcgatacacatttgtaaaaggttgaatccatgaaaccaacgacactactgcttattttcacttttttcgctatgccaggcatcgtatacgccgagagcccttttagcagtctgcagtccgcaaaagagaaaaccacggtattacaagatttacgtaaaatttgcacgccacaggcgagtttaagtgatgaagcgtgggaaaagttaatgttgagtgatgaaaacaataaacaacatatacgcgaggccatcgtggcgatggaacgtaataatcagagcaattattgggaagcgttgggtaaggtagaatgcccggatatgtaagaacagcaacaactactgaccaacgcttctttacctgatatcaggatttcttcattttcacctttgcagtaaccaacaatgcagtcagcaacatcaatgtgccggacaacatcaacgggctagtcagaccaatattatccagcgcataaccgccgattgccgcgccacaggtattagcaagctgaataaccgccacctgaatagacccggctttttctgcctgatcggccaggctgcgggtgatccacgtactccagccgacgggaaccaatgcaaaagttagcccccagataatcgccacgccggtagcaacgattttatcgcttccccacaacgtcagtaccaacgcactcacagccagtattaacggcgcgcctgctaaggccagttttacgctacgtttaagaatgaagctgctaaggctcgtaccaataaagctggcgataccaaaactcaacagcaccagcgttaagccatccacgccgaatcccgccaggttcatatacaccgggcgaatatacgtgaagaaagcaaactgcccggcgaaagacatgaagatggcgatcatccctgccatcacacccggacgttgtaataagcggaaagtattttgtttctgatggctgggttcgcctggcagactaggcaaacttttgataatccagaaaatacacagcacgcccatcaccgccgccgcattaaagacattgcgccaaccgataagctcgcctaaaaaactgcccaacggcgcggcaatcaccagcgcaatagaaaccgcgccgaagatcacgctcagcgccttcggcaccgtacgcggcggcaccagacgcatggtcaggctcgcgctcatcgcccagaacccgcccagcgccagccccagacaggcacgaccgattaaaagcaaactgaaactgttagcaaaggaaaccagcaagcaggagagcgtcagcaaaacggcaaacaaaataacaacgtagcggcggtcagtagcctgaattgtctgggtaataaacaaactggcaaacattgccacaaaggcggtcacggtcacgctttgcccggcaaccccttcgctaatgcctaaatcctgggccattggcgtcaacaaactgacgggcaaaaactcaacgataatcagacaggcgacacaaaacgccacgctgaaaacggcactccagttcggtcgggtgatggcatccgcgccgcggttttcggcaataaattcactcatggtgttacccgtggcatgtttcaggggaaaagcgctccactttaacatactaatgtgactcgcatttaacgtttttgcaacttttacggtgttgctactgctggagttaagatcgaaacggaacagggcaaagattaccggatgcggcgtgaacgtcttatccacccgacaggtcaggcgcggtctgtaggctgataagacgaaacggtttcaatgcaaccagtgaacgccctcggcaggctgaaagaacgcgttatagcgcatctgaaaagcattaatatcctgcatttcaggttcggtttcgcgcagaaaacctagcgccagcctgacctgagcgtcggtaatcggcgcggcgaggcgagctttttgtaaaatccgatgccattgcagcaggttctgttcgctaccatcgacaatgacaatttgccagatgagcaacacctgcgcggcgttttgcaggtggctctcatccggacgatgcaaataacgtaaaaattcgtcaccagcactctttcccatttgatcgaccatgctctccacgggtacgacatcgatgttcagccgatcgctgagacggcgaatcgcttttctggccccggatgtcagcacccgaaaaccaaccacaaacactaccgccagcgtggcgagcattatccagatcatgagttctcctgcgtaatcagaactcatgatatctggaaaccctcgccagttattaatccaccagaataatcttcagtgcaaacagagctgcgaccaccaccacacacaggttcagatcgcgccagcgcccggtgcatactttcatgatgcagtagctcataaagccgagtgcaatcccttcggtgatgctgaaagtaaagggcatcatcaccgtggtaataaacgcaggcacgctttcggtaaaatcatcccagttaacgcgcgccaggctgctagtcatcagcacgccaacaaagattaacgctccggcggttgcgtaaggaggaactatcgccaccagcggactgaagaacataaccaacaggaacataacgccaaccacaaccgcagtcagccccgtgcggccaccgactgccacaccagaagtactttcaatataggcagtaacagagctggtgccgataaacgcacccgccacgctactgacgctatcaacatacagcgccttattcatattggggaatttaccgttaccatctattaagcccgctttatcagttacaccaattaatgttccactactatcaaataggttgatcagcataaaggagaaaatgataccggcgagttcaagtgttaacgcgccgctcaaatctacttcaccaatgacgccgctaatatcaggcggaatggaatagacgccgctaaaatgaacatcaccgaaaaataatccacagcaagacgtcaccacaatagaaaccagcaccgcggcatgaaaatgacgactactcaacacggttataataaaaaaccctaaaatacctaacaacacgccgtgagaacttaaatcgccaatcatcaccagcgtgtctttattggcgacaataacgccagtattttttaatcccattaaggcgataaataatccaattccgctggtgataccaatacgtaaacttaagggaatgttggagatcatccagtaccggatacgaaacagcgtgagcaaaaatagtccaactgcgccccagaatattgcgcccatcccggtctgccaggagatgcccatcgcccccacgaccacgaaggcaaagaaggcgttcagccccattgccggagccagcgccacgggtaagttagcaaatatccccatcgcaatactgccgataccggcaatcaaacaggtggtaacaaacaccactttcgggtccatttgtgccgcgccgaggatttgcgggttcacaaaaacgatgtacaccatggttaaaaaagtggtcatccccgcaatcaattctgtgcggacggtggtcccatgctgaggtagtttaaataatcggctaagcgtcccactttcattactcacgtaatcggtattgtcattattcatttttttgtccattggaggagatttaatcccttgcttttgtaaaacaaatgacaacaacggttcagtgataattatcacatttcaattgcacattaatggatattctttaataatctcgcgacgtttctttatgataaataataatcaaattgataaaatcaaaatgagaaaaatatgaataattctattaaccataaatttcatcacattagccgggctgaataccaggaattgttagccgtttcccgtggcgacgctgttgccgattatattattgataatgtctctattctcgacctgatcaatggcggagaaatttccggcccaattgtgattaaaggacgttacattgccggtgttggcgcagaatacactgatgctccggctttgcagcggattgatgctcgcggcgcaacggcggtgccagggtttattgatgctcacctgcatattgaatccagcatgatgacgccggtcacttttgaaaccgctaccctgccgcgcggcctgacgaccgttatttgcgaccctcatgaaatcgtcaacgtgatgggcgaagccggattcgcctggtttgcccgctgtgccgaacaggcaaggcaaaaccagtacttacaggtcagctcttgcgtacccgccctggaaggctgcgatgttaacggtgccagttttacccttgaacagatgctcgcctggcgggaccatccgcaggttaccggccttgcagaaatgatggactaccctggcgtaattagcgggcagaatgcgctgctcgataaactggatgcatttcgccacctgacgctggacggtcactgcccgggtttgggtggtaaagaacttaacgcctatattactgcgggtattgaaaactgccacgaaagttatcagctggaagaaggacgccggaaattacaactcggcatgagcttgatgatccgcgaagggtccgctgcccgcaatctcaacgcgctggcaccgttgatcaacgaatttaacagcccgcaatgcatgctctgtaccgatgaccgtaacccgtgggagatcgcccatgaaggacacatcgatgccttaattcgccgcctgatcgaacaacacaatgtgccgctgcatgtggcatatcgcgtcgccagctggagcacggcgcgccactttggtctgaatcacctcggcttactggcacccggcaagcaggccgatatcgtcctgttgagcgatgcgcgtaaggtcacggtgcagcaggtactggtgaaaggcgagccgattgatgcgcaaaccttacaggcggaagagagcgcgagactggcacaatccgctccgccatatggcaacaccattgcccgccagccagtttccgccagcgactttgccctgcaatttacgcccggaaaacgctatcgggtcattgacgtcatccataacgaattgattacgcactcccactccagcgtctacagcgaaaatggttttgatcgcgatgatgtgagctttattgccgtacttgagcgttacgggcaacggctggctccggcttgtggtttgcttggcggctttggactgaatgaaggtgcgctggctgcgacggtcagccatgacagccataatattgtggtgatcggtcgcagtgccgaagagatggcgctggcggtcaatcaggtgattcaggatggcggcgggctgtgcgtggtacgtaacggccaggtacaaagtcatctgccgttacccattgccgggctgatgagcaccgacacggcgcagagcctggcggaacaaattgacgccttgaaagccgccgcccgtgaatgcggtccgttacccgatgagccgtttattcagatggcgtttctttctctgccagtgatccccgcgctaaaactaaccagtcaggggctatttgatggcgagaagtttgccttcactacgctggaagtcacggaataataaaaaaagcccggcgtcatgccgggcaaaagtcaccagttacgtttatgccactgtcaactgctgaatttttttctcgcggcggattttgcgttcttccattaccgccactatcgccatcaggcagatacaaccaatcgcggcgatatccagcgcggcgaaggtgcctgcccagccggtaaggccgaataccggcgtcccatcggcaatcattcccagacctaacttggcaaagctgtcaccaatcaggtaagcaaaggtgcctttaataccatcggcagcgccaatcgcttttttaggtacaaagccaacagcagccacaccaatcaacaattgcgggccaaagaccaggaaacccaacgcaaagagagaagccagatagatatattcgttactggcatgttgatacacaccgagcgtggcgataatcagcgccagcgcgatgcaggccaccaggccacggcgaccgttcgccaggtcagagagccagccccacagcagcgtaccgaccagcgcaccagcttcaaacagcgtaaagccctgaatcgccaccgctttagagagtttcagttcctggaacgcgtatacggtactccactggtcgataccaatacgtaccacatagaggaaaatgttggcgaagcacagcagccagatcactttgtttttcagcacatactcaacaaagatctgccacttggtcatatcggtagattctgtctctttgtcctcttcgctgatctcctcgccgaacagttcttcagctttgccgaggccataagattccggggagtcgctgccgtaacgcaggccgataaaaccgacaatcagcgcgataatgctcgggaagataaacatgccgatgacatggccatcgaacaggtaatttgccccgaacagcgccacacctgctgcgcctgcaccgccaaggttgtgagaaatattccagaaaccgaggaatgtcccgcgtttacgacgcggcgtccatttggtgatggtggagtaactgcagctaccgccggtactctggaaaagccgcttaaggcgtagaaggcaatcatcaggaacaggctaacgctgccgctgcccatactggcactgaagcccagcatacaaatagcagagaggatcagcatgaacggcaggaattgtttggtgtttttgccgtcggcgtagtaggaaaccagcgttttacccacgccataagtgatggagaaacccaggccgatcatccccagctgcgtcatgctcaacccgtaggtgctaatcatatcgttctgcgcgatgttaaagttcttgcgaatcaggtacatcgtcaggtagccgataaagaccaccaggtaggattgcatgaacggtttgaaccacattttgcgccgcacttcgagcggaaggtccagggtcggcttgcgaacctggtttaagaaagccagcatgggttactcctgaaatgaatacctgcgtgaggcatgcattgtaaaaatcagcagcaaatcaggcctgagatagcgtccaggcaaaacctggaaaatttcttagttttgccggatatgaagtgaaaaggtgagatgcatcacgcttcgcgcggtgtctgggcgttcaaaaagggcagtaacagcagtgcggaaatcccggcggcgatagagataaccacaaaaaatccgctccagtgccaggtatcgagtactttcgccagcggccaaccagcaaggctcgcccccagataagcaaacaagccgacaaaccccgtcgccgcccctgccgcctctttgtgggaacactctgccgccgccataccgattaacatctgtgggccaaagacaaaaaaaccaatggtgaagaagcaggttgcctgcatcacgtagctggcaaatggcatcagccacagggagccgacactaagcaaaattccggcggcgaaaatcaaattcatcggccctcggttgccgttaaacaatttgtcgctgccccaaccggctaccagcgcaccgataaatccgcccagttcaaacatcgtcactgccgtattcgccgtgaccagatcgacgcccagtgtctcggacatatacaaattgccccagtcgttgatcgccgcccggaccacatagaccagcacatagcaaaagctaagcagccagatatacggattcagcaacacatatttggtgaggatctctttacgcgtcaaccctgccccttcttgttgttgagcaatttccagcgcgtcgtgtcgccattcaccgaccgccggtaaacctaacgcctgcgggcgatcgcgtagccgccagcagagaaaaatccccacgactatcgccatacaaccagcaatcatcatcccggcacgccagccgtaatgcagcgcagccgctgccatcacaatgggaatgagtgcgccgccgacgttatgcgccgtgttccataatgcccaccaaccgccgcgctcggtacgactataccaggccgttaacagacgcgcacacaccggactaccccagccctggaaaaaggcgttcagcacccagagcacggcaaacgcccataggctcgtgctgaagccaaacagaatgttgataatgcccgtggcgataagccctatccccataaaataacgggcattactgcgatcgctgacaatgccggagacaaacttgctcacgccataggtaatgtaaaacagggtcgctaacaggccgatatcgctacggctgagcacgccgttagcaaggatttctggtacggcggcgttaaaacttttccgcgtgaagtaaaacagcgcgtaacccagccagatggtcagcagaatatgccgacgccagtagcgatagcgggcatcaatttcatatttatcagtcattaatggcgcatcggcaggcgctttcagaaacggcaacatcatcaaaccttagacatagcgttgaggtagagaaacgctgacacgcgtgccgtgcagacaggaaatgtgtaatgtgccacccagcgccgttacgcgctcgcgcattccggtgaggccaaaaccttgttgcccggaacccggcggcaaaccgctgccatcgtcttcaataaccagcatcaaccgttcatcctgctgccagccttgcagggtgaccgcgctggcatcagcatgtttcacaatgttgttcagcccttcctggcagacacgaaacagcgtcacgcgctggttttcgcttaacgcactttcatcgattcgccattcgagatggctgacaataccgcgcccttccagctccatttcccgcatcagactgcggatggcctgctccagggtgagatcatccaactggcgcggacgtaaccgacccaacaaacggcgcaccgcgtcgtaaacgcccaggcttagttgttcgatgagctgcccgctctgcttcacgctggcgttatctgccgccagccgctgaacaatgcccgcctgagtacgaatagcagtgatggtctgaccgatatcatcatgcagctcacgcgccacatcacggcgcacgctctcttcggtttccagcaaccgttcagccagatgctgattgcgcgccagttccttttgcaggctctggttaagttcacgcaaccgctggatgccagcgccaagcaacaaccctgtcagactttgcaccagcaggctgagcaataaatccaccggatgatcgcgccaggtttgactggcgatcagcgcgatggcgttcatcaacgtcgcaatcagcgccccttgccaaccatagtgccaggccagcgcgataatcggcagcgccagacagaatggcgtaaagcggctcagttcgtccggcaatcccaactggagccagagactgataacaaacagcagcaagtaccagaccagatgtcgcccgcgccagttgattggctgagaaaccagactcggaccgagcggcagccaggtgttattggcgagatagtgccagaacaccagacatatcggggccagcgtcaggccgccagttaaagtcagcaacagcgcattccagctctctttgccgtgccaaagccagggcaggctctgcaacaacgccgccgccgttaacgccgccccctgtaacagcaaggtgcgccagtcacgctgatggcgatagcggctgatcagcgctacgggcagtaacgtcagtaaactaccgatcatcaataacggaaaatgggttaaaccgaccgcctgcgttagccagtaaatcagcagccactccgcgcccagcaatacgggccagtatccgcgcgggcattgcagcattagccccagacgcagaccaaacggaaataacagcaccgccatatcagggcgctcaaccagatgcaggctgatactccacaggcaaaaccatgcggcagagaagataaaaaagcaggcaataacggtaattaagcgggagaacaacgtcttcatcaccagccatcaaacatgcggcgcgccagctctacgtcgttactgacgcccagtttttccatcagattggcgcgatggacgtgtaccgttttcggactcaagcccagttcggcggcaatctctttcaccgccattccttgcgccagtttttccgccacctggcgttcacgtttggttagcgggtcctgacgaccggatgccagtttaatggcaatatccggcgtcagataacagccgcccgtggcaaccgtatgcaccgcagcaatgagttcatccgggctacagcgtttggaaagaaagccgcgtgcccccgcgttaagcgcctgctcaaccagcgcaggactgtcgtgaacggagagcataatcgtcgccatacctttcggcagctggcttagcagctccagaccggagatatcgggcatggagatatcgcaaatacacacctgcacaccgcgccccggcagccccgccagcgcctcgcgcccgctaccaaactcggcaactacctgcaaatcaggttccagccccagcagctgcgcaaagccggagcggacgatgaggtgatcgtctataagggcaacggtgatcatggtcttgtcctggcgggtaaaaaaaatacgcgcttaccttaacgataagcgcgatgttgttcaagccttgagcggttactgaaaaaacaccgcgatcttgttaaacatcgtcggatcggactgattacgctgcactttcacgacatcttccagcttatcgatttggcttatcatctgctccagacgctggtcgtcattgaccagtagccagatatggcttttgtcgctgtcctgaatcggcagacaaagaatgccttcaacgttaaaagcgcggcgggcaaaaaggccacaaacgtgggtcattacgcccggatggttgcgaacggtgagctccagaattacgttgtcatgagttgtgttttgcatggcttattcccccaccatttcagtattcgccgcacctggcggcaccatcgggtaaactttttcttcggcatcaatgcgcacatggatcagcgccgggccagggcgattgatgatttcctgcaaactagcctgcggatcggcttcgttattcaaatcacaggtttcgaggccgaatccggcggcaatctgcataaagttgattttgcccggataggtggcggcaaaaacgccttgctcgtagaacagactctgttgctgatgcaccagccccagcgcttcgttgttcatcagaatgattttgacatccagctgattttcactggcggtcgccatctcctgaatattcatcatcaggctgccgtcgccggagaaacacaacactttgcgatccgggttcgccagcgcagcgccaatcgccgcaggcaggccaaaacccatcgtgcccagcccaccggaggtcagccactggcgtgggcgattgagcggataagcttgcgcggtccacatctgatgctgaccaacgtcggtggtgataattgcattgtcatcgacacaggcggcaacggcgttgatcaggccgtaatggcttaacggatcgcacgctttcgggattggacacggaaactcacgctgcaaatccgctaccaactggtgccactctgcacgcggttgcgcttccaccagcgggatcaactgcgccagcacgtcatcaacatccgcctgaatcgccacgtgcggctgcttgattttacccagctctgcacggtcgatatcgacatgaatgattttggcattcggacagaactgctcggttttgccaatcgcccggtcatcaaaacgcgcaccgagcactatcaacaaatccgcctcctgcaaaatatagttggtgctgcgcacgccgtgcatccccagcatacccaggctcaacggatgcgcttttggcaacatgcccagcgccattaaagtcatggtggtaggcagttgcgctttctccgccagttcacgcacccgtgcgggcgcattgatcacaccgccgcccagataaagcaccgggcgtttggcagcgttaatcatcgccgctgcgtcacgaatgctttcttcgctaaaggcgggggcggcggctttttctgccatagcgggctgtgtttcaatctcaaaaactgccgtttgcacatccttaggaatgtctatccacaccgggcctgggcggccactttgcgcaatgcggaaggcatcgctcatgacctgcgggagttcttcgatatgtctgaccagatagttgtgtttggtgatggggatagagatgccgtaggtgtccacttcctggaaggcgtcggtgccgatcatgctggcgggaacctgaccagtgatgcaaatcagcgggatggagtccagccgcgcatcggcaatggcggtcaccaggttagtcgcacccggtccgctacaggccatacagaccgccggtttaccgtcggtgcgcgccattccctgagcgataaagcccgcgccctgttcatgacgggccagaatatggcggatttgcgtgctttggcttaaggcatcgtaaacaggcaggatagaaccgcccggaatgcctgtcacaatcttaatgccctgctgttccaggaaatgaacgataaattctgcgccggtaaagcgcttacgcgtgcttgttgtgccgctacttgccatgctccagtccttttcttctgggccgactttccgggaggtgcttaaacgaaaaaccccgcccggtttgcgccggcggggttttggaatcgtgtgttgttccagtccttacggcgcattgccgacgaccaccaccacacgcacgacgaccactgcggcggatggcgcagttggtagtagttttgcgttgagcatggaagtagtcattggggaccttgttggttttgtgtttaacaatatttatacaagcacagctttacaggggagacaatggaaaatttttcagcaagggaaaattgaggggttgatcacgttttgtactgaattgcagataacaaaaaaccccgccggagcgaggtttcgtcagtcgcctgcggctggtaaccgcaaagcacactgtattatgtcaacactgaaagtatacgtgttccgcgcagaacgcgcaatttcggcacgaattttgacgtatttagtgcatagttgagtatcgatcacagtttgcgttttgtccaaatattactgtttatttatacagtaaacttctataatatcactgtacgcaatgtgttatgcgggggccgcatcgttacccggcgcactaagttctggctgaaacgggtggtgccgtcagcgccttaaccccgcgtgagcacactgtgttatgtcaacaagcacaacgtttctccttgagataccgcgtgcacaacagctggcaacaggcagcggaaaggtacgtcagctggcagtgctcctgaaccacaggagacgcgtatgaacctggtggatatcgccattcttatcctcaaactcattgttgcagcactgcaactgcttgatgctgttctgaaatacctgaagtaattcagattcaagtcgcaccaaaggggagcgggaaaccgctccccttttatatttagcgtgcgggttggtgtcggatgcgatgctgacgcatcttatccgccctaccatctctcccggcaacatttattgccgcttttgtttacatattctgccgctaaacaattccccattcctggcgtatatctggctaacattcatcaatgtgatagattcctctcccgcatttatgggaatgcgtagtgacttattctaattatttttataaaagcatccgtgataatgaaaaggcaaagaaacgtcaatttgttattgatgttggtattactcgtggccgtcggtcagatggcgcaaaccatttatattccagctattgccgatatggcgcgcgatctcaacgtccgtgaaggggcggtgcagagcgtaatgggcgcttatctgctgacttacggtgtcagtcagctgttttatggcccgatttccgaccgcgtgggccgccgaccggtgatcctcgtcggaatgtccatttttatgctggcaacgctggtcgcggtcacgacctccagtttgacggtgttgattgccgccagcgcgatgcaggggatgggcaccggcgttggcggcgtaatggcgcgtactttaccgcgagatttatatgaacggacacagttgcgccatgctaacagcctgttaaacatggggattctcgtcagtccgttgctcgcaccgctaatcggcggtctgctggatacgatgtggaactggcgcgcctgttatctctttttgttggttctttgtgctggtgtgaccttcagtatggcccgctggatgccggaaacgcgtccggtcgatgcaccgcgcacgcgcctgcttaccagttataaaacgcttttcggtaacagcggttttaactgttatttgctgatgctgattggcggtctggccgggattgccgcctttgaagcctgctccggcgtgctgatgggcgcggtgttagggctgagcagtatgacggtcagtattttgtttattctgccgattccggcagcgttttttggcgcatggtttgccggacgtcccaataaacgcttctccacgttaatgtggcagagcgttatctgctgcctgctggctggcttgctgatgtggatccccgactggtttggcgtgatgaatgtctggacgctgctcgttcccgccgcgctgttctttttcggtgccgggatgctgtttccgctggcgaccagcggcgcgatggagccgttccccttcctggcgggcacggctggcgcgctggtcggcggtctgcaaaacattggttccggcgtgctggcgagcctctctgcgatgttgccgcaaaccggtcagggcagcctggggttgttgatgaccttaatgggattgttgatcgtgctgtgctggctgccgctggcgacgcggatgagccatcaggggcagcccgtttaagcgcacgtcaccgcagcatcgtcatcagctccatgggagaacgatgctgctttatcagatcacgcatcacccgcatatgcggtgcggagtaagaataaaacgcctgatagcccgcacaaagcacgctgtctggcgtctcctgccgagcgtgcgggcacaggcgatgccagtcgcacgcctggcagtcacagcgcggttgcgggttttcgctgccacaccatttttgtaaggtggcgtcaaaaagctcaatgctgatacgactgatatctgcccgcacccaacactcgaacagggcaattaaaaatttcccccacagctctgctgtcacgctagcggccgtcagatcgccccggtcatcaaattcaagatagggaatgagctgtacggagcggatgccccgctgtttgaaattgtgataaaaatcggcaggttgcagagcatccttgtactctacaaccagtttatgcctgtcctcttcagcatcaatgacctgacttcctgtcatgcgactctctcaataaatacgataagttgatgtatatgcgttacagcaaacagtattgcgagagataacaccgcgagggagatcaaaaatttgtcacggactacgtgaaattgggaaaaatcgctattcgtgacatccattaaattgcgattacgggtgtagtgccagaggatcagcgccacgatggcgagaatgccaatgctaatccagaataacatgcccgcctggtgccagttgtgtttgatagccaacgccatcaacgcgccgtagcccagcatggtacgaaaccacgccagacttgtgcgctccggctgcagtcctgggtcggcaatgcgtctggctttgcggctatccggcatacaacaccagtcccataacgttaattatccggcatacaacaccagtcccataacgatcaccgccacgaccatcaatattaagctaatgattaataagctgttggtgtagggcaggtcctctttcagacgcatcgctttttcattgcgtaaccagcgcaagtagccatacatcgctaacccgccggaaaacagacacaacaacaacgccagcagttcgcgaatgacgggcgtggcgaaatctggcgcaagttgatcaagcccaacccccgccgccagaaatcctagtgcagtacggatccacgccagaaaagtacgctcattagccaggctgaagcggtaatcaggcgcttctccgaggcgggaaattttcattgttgctcctttgcaatttcactaacgctctacctttagcggtttttttaagaatttcgtccgcccgtttcctgatatgcttttgccatccgctacaaggaggtcagatgggtatcatagctcaaaataaaatcagtagtttgggcatgctgttcggtgccatcgctttaatgatggggattatccactttagtttcggccctttctccgcaccaccgccaacgtttgaaagcatcgtggcggacaaaacggctgaaattaaaagaggtcttctcgccggaataaaaggcgaaaaaattaccaccgtggagaaaaaagaggacgtagatgtcgataaaatcctcaatcaaagcggtatcgcactggccattgctgcgctactttgcgcatttattggcggtatgcgtaaggaaaatcgctggggcattcgcggcgcgctggtttttggcggcgggacgctggctttccataccttgctttttggtatcggcatcgtgtgcagcattttgctgatattccttatcttttccttcctgaccggcggtagtctggtttaagcagcctgaataatgcccgccgggtgatcatcagcgggcattatcgtcagaacttctgttttttctcctccaccttcaccccttgtgtcggtaggccggtgtcatagtcgcgtacaactgggctatagccatcttgtggacgtggacgaaacgccccatccagcgcggccgtgcatctttacgccacggacgcagactccattggtaactgcggaacggatcgcgaattttgtccatgtaatccaataaggcgtcatgcattttgctgcgaacgtctgcaaaacggatatcatcgatcaggttatgcatttcatttgggtcattacggcgatcgtaaagttcatcactggtgaagaggttgagtaccagtttaaagtcatccgtcacccagcaacgcaccggaataaaaccgccaaagctgtcatgctcaatctcgtagcggttaaattccaccatcacgccgcgtggctctttcacggcaaggatattttcccccggcagaatctctggtttttcaatatctgccagcgccatcattgtcggcagtaaatcgatatgactgactggcgtatcgacctgtcgccgctccccttgcgggctacggatgatcagcggaatgcgggtgatgtcgtcatacatcgccgcccctttactgatcagcttatgtgcgcccatcatttcgccgtgatcggaggtataaataacccacgtattttcacgttgctctggcgttaaggcattgatgacccgtccgatttggtcatcaacaaagtcattacaggcaaaatagagcggatggtgataaagcccgtcatcaccgactgggcttggcatcgcctgcgcccataagcggtgatgttccggtttgttagccaggtcatcctgtgctttctcgcccagctcgtagtaaaaatcagcgtatttctctaaatactccaccggacaggtgaacgggtgatgcggctcatcatagctaaccaccatcaggaaaggctcgtctgcgcgcgcaggctgttgcagaaaatccaccgcccgattgctgatacgatgcgcccaggtgaaggtttcgtcgatatggttcgcctgtaaatcttcgacgctgtttaggccattgcgccacaggctaatctctttttccgtcagttcgctaagatagttcgccccatcgaaccagtaatcagcgtcccactccggcggacactcgccagtgccgaaatagtcatgaccgtcgagatgccatttgccgatgtaacaggtgtgatagccggcatccttaaagtagcgccccatagtggagatgtttttgcctggcgcgacgttgttggtccacgggccggactggttagcgtagataccggtaaatagtccggcccgtgcaggcgtacaaaccggactacaggtgtaggcggaattaaagcgaataccttccgccgccagactatcaatattttgcgtattcagcggtttaccgctatagcaaccgaccatattggtggcctgggtatcggtcatgacgaacagaaaattggggcgtttcataggctatccttcccgtcgggagtaaaggttacggctgggtcgtgacgatgccgccagctgtcaaaaatcaggtagacaatcactacggcggcaatgaaataactgatcatcgctaaccagcgcgtaccgtagccgccgaattcagccagcccggcatagacgccaatcatcgcgaacaggatgccaatactcgcgatcttgacgtttttccacggtttcatgtccaccgcaaacgcatctttgaaggtgaacggcgtggcgcgcggtttgataaaaccgatcaccagcatcacgaccacgttgatgcagaacgtacaggccagcacatagaggaaatggaagtcgaacttcaccagatagttgatggtgatgtagctgattatgccaatccccatcgctacttttgccgccagcgccgggatgcgcgggaagaaaaagcccataatgatgatggtaaccagcggcacgttgtaaatgccgttgagctgtttcatccagctatacagcccctgcggcgcgttggcgatccacggcgcgaccagcacgctaacgatagcgataaagaaaccaaatttgcgcccgacggtgaccagctgctgcggctcggcattctggttaatgatgcgacggtaaatacccatactgaataacgtactggcgctattcagaaagccgttgaaggtactgatcaccgcaccaaataacaccgcgccgaagaaacccaccattggcactggcagaacgttattgaccagcgtcgggtaggccatgtcggctttcggtaaatcctgatacagatgaaacgcaatcaaccctggcagcaccagtaccagcgggtcgagcattttcagcaccgccgttaacagcgcccccttttgcccttccgccaggcttttactcgccagcgtgcgttgcacgatgccctgatttgtacaccagtaaaaggtgttcaccagaatcaaaccggtaaatgccgcgccaatcggcaagggatcggtcgggccaccgatactgtttaatttctcggcgtgaacggtggtgagttgctcaatgccctgcataaagctgcccttgcccatcgcgattaggccaaataccggcaccatcaacccgccgataaccagcccaataccgttgatggagtccgccactgccattgcgcgcagtccgccgatcaccgcatacaaaattcccgccagaccaagcaaaattaccagtagccagatagccgcaccgtgagaaatctgtaggctttccccgacgtgaaacaggctgttgagcgccaacgcgccggagtagagaacaatcggcagaaagcagacgccggtggcaattaggaagcagaagtcgatgataatacgcgtcgttttatcataacgttcctccagaaaatcggggatggtggcaatgccgcgcttcagatagcgcggtaaaaagattagcgcgaggaagatcagcgtcaccgcactagtcacttcccagcccatcacgctcatgccgcttttgtaggcctgcccggaaaggccgaccagttgttccgtggaaaggttggttagcattaagctagcggcaataaccggcgcttttagactacgtccggcaagaaaatagccttgttggcttccggtatctgttttgcggaccttccaccaggtgatcaccgccaccagcagcgtaaaaccgacaaaactcaagatttgtaagctattcatctcatagcccttatttatgtttatgtcccggacgcatgaatatagggagaggtaaaatgcgtcgggtcaggcagtcagattcttaaaatacaaacgtcgtatccctgaacggattgttttctgttaagttcaggttgtgagcataattcgccggagggatattaaaatgaatggaaaattgcaaagtagtgatgtaaaaaacgaaactccgtacaatattcccttattgattaacgaaaatgtgatctccagcggaatttctctgatcagcctctggcatacctacgccgacgagcattaccgggtgatctggccgcgggacaagaagaaaccgcttatcgccaacagttgggttgcggtgtataccgtacaaggatgtgggaaaattcttttaaagaatggcgaacaaataacactgcatggcaactgtattatattcttaaagccaatggatattcactcttatcactgtgaaggtttagtctgggaacagtactggatggaatttacccccaccagtatgatggatattcccgttggtcagcaaagcgttatttataatggcgaaatttataatcaggaactcaccgaagttgctgagttaataactagtccagaagcaataaaaaataatctggcagtcgcttttctgacgaaaattatttatcagtggatttgtcttatgtacgcagatggtaaaaaagatccacaacggcggcaaattgaaaaattaattgccactttacatgccagtctgcaacaacgctggagcgtagctgatatggctgccacgatcccctgtagcgaagcctggttgcgtcgtctgtttttacgctataccggcaagacgccgaaagaatattacctcgatgcgcgtctggatctggcgctaagcctattaaagcaacaaggaaacagcgttggcgaagtcgctgatacgctcaacttcttcgactcctttcatttcagcaaagcctttaaacataaatttggttatgcgccgagtgccgtgctaaagaatacggaccagcacccaacggatgccagtccacacaattaacgtaactctggccagtacgctttgttggcctccagcaactcatccagaatagctttggcgacgctggcgctcggtaccgttttgctcaacgtaatcgcctgccacaggtgctgataactacgctgttcccaggcgtccacgaccagtttttccaccgccacttgctgactcattaaccctttctgaaactgcgggatatcgcgctccaccagtggttcaggccgtagtagcgcacgcgcatctgtttgcgatcttgcagcccaacaatttgcgccatccggctttcaataccgattggcatgtcacagatgttgaggattttcgcattcgggcgcagacgacgcgtggcttctgcgacaatggctgccgggttggagtagttgagcatccaggcatttggactatatttttccatataatccaccagttccaggacgccgccaatggaacgcatgccgtacgctattccgccgggtccgcaagtttcctgaccaacaacgccgtggcgcagcgggattttttcatccagttcgcgcatcgggtatttgccgacgcggatgtgcgccatgacaaaatcaacgtcgctgaatgccacttcaggatcggtggtgtaactaaacgcaatgtccggcgctttttctttaaggatgactttacaggcttcggcaatcacttcctgccgcgcaccatcgttatcataaaatttcagtgcacgaagcgggaaacggtcctgattcgccaggagcatcaacacgatgcctggcgtaaaggtgcttccaccgcctgcgacaaccacactgaatttggtcattatactgcctccgtaatggcaacattttctgcactttgatgagaattaattaagctatcgagctgttcacgcagctgagatacatgcagaccaatgatcacctgaatggcatcgccactacggaagacgccgtgcgctcccagctttttaaagacttcgtcatccagcgtttgactcatgtcatgcagtgcaatacgtaaacgcgtcgcgcaattgttaatgctggagatattgccgaccccgcccagggcttgcaggataccggcagcctgatccagctcttttttttggctctgccgcggtggtttggcctcggctggctttgtattcggctttactgtagagtttcacttccgcatcttcacgtcccggcgtgcacatgttgaactgcagaatcagtgtgcggaaaaccacgaagtacagcagggtaaagcacaacccaatggcgatttgggtcagcatcatatccgcgtggttgctgaacatcgggatccagttttgcggtaaaacttagtcaatcagacctccgcccatgttgcccaccacaccaaagagatacattacggtgctcatactggccgccagcacggcgtgtaccgcaaacagcaacggactaatgaacaggaaggtaaattccagcggttcggtaattcccaccagcatggcggttaaggttgcgggaatcagcaagcccgccacttttacccgattttccggtgcggcagtgaagtacatcgctaaagaaatgcccacggcaccaaagattttactgttaccgtgcagggcaaaaccgccttccgggaacaagcttttcagcggctcggcgctcaaactgaactcttgcagatgctgcgcccagtacatctgaatgccgccttcaacagctgccggaccaaagataaactgtccgtagatgaagtggtgtaaaccggttgggatcagaatacgttcgaggaaggtgtaaacccagaccccaagtgcacccgcgctacgcaggaacgcttgcagagattcaatccccatttgtacttttggccagccgagcaacgtcagccaggcacaggggatcatcaccaggaaggcgataatcaccacataagacgtcccctggaaaatgccgagaaaaaccggcagttttttatcgaacagacggttatgcagcgccgtcacaatgccggaaatgataattgcgccgataatgctggtatcgagggttttaatcccggccatcattgtcagaccgctacctgccaccgcgtcctgagtgaaatcgacgccgaagtagcttccccaggccattcccatcgcgttgatgaaatagttccaggtcaggaaactcaccatcaccgccagacaagcacgcccctgcgcttgcttagcaaggccaatgggtaaaccgacagcaaaaatcagcggcatattacggaataccgtccaaccgccctcttcaataatgtgtacgatttgcgcgaataaactgttcggatcggtcagactttccccgacaaacatcgggttttgcagcaagatggcaagacccaccacaatcccggcgaagggaaacagcagcactggcgtgaacatcgcgccgccaaagcgttgaatttgactgagcatttccacatcctcttttctcaattctgtaagtaggaagcctgattggttatgcggcaggcctggagcgaggataggaagatgcgatcggcagaacatgacgacccaatgggattcgtgatcgctttcatgcttttcgttgggcggtagagatctacgttttcgcgaaaaagtagacctctgtgagcacaggtacacagcatcgaacacatctttaaaaaaaagatgttttttcaatcgattaagcagaacttgtgtgcgcattacccgggcttgcaggcaaaaaagagatctagagatgatctacaaaagcattgcggagcggttaagaattcgacttaactccgcagatttcacgctaaacagccttcttcccggtgaaaaaaagctggcggaagagtttgcggtaagccggatgaccatccgtaaagccattgacctgctggtagcgtgggggctggtggtccgccgccacggtagtggcacttacctggtgcgcaaagatgtactgcatcaaaccgccagtctgaccgggctggtggaggtgttaaaacggcagggaaaaacggtcaccagccaggtgctgatttttgaaatcatgcctgcgcctccggccattgccagccagttacggattcaaatcaacgagcagatctacttctcccgtcgcgttcgttttgtggaagggaaaccgctgatgctggaagacagctatatgccggtaaaactgttccgtaatcttagcctgcaacatctggaagggagcaagtttgaatatattgaacaagagtgcgggattttgattggcggtaattatgaaagcctgacgccagtgctcgccgatagactgctggcgcggcaaatgaaggtagcggaacacacgccactgctgcggatcaccagcttgagttatagcgagagcggggagtttttgaattatagtgtgatgttcagaaatgccagcgaataccaggtggagtaccatttacggcgactccacccggaaaagagttaaccgatactccagaagagcaccgccagtaattggggggtgataatgcgcaggaacattaccaacggatagacagtggcgtaagagagcgccgccgcaccgctggttggatgaagattattagcaaacgccagcgccggaggatcggtcatggaacctgccagcatcccgcacatggtcaggtaattcattttggctaacatccgcgccagaatgccaacagtaatcagcggaacggcggtgatcagggcaccataaccaatccagcttagcccttcgccattgaccagggtattcacaaaatccccaccagatttcagaccaacgacgctgaggaacagcacgatccccagctcccgcagcgcgaggttggcgcttggcggcataaaccagtacagcttgccgatactgccgatacgcccgaggatcaacgccataatcagcggtccgcccgccagccccagtttcaacgcggccgggaatcctggcacaaagacgggaatagaacctaacaatacgcctagcccgatgccaataaacactggcagcatctgaacctgttgcagtttttgctgcgcattccccagcacattggcaacggcatcaattgcggacggacgccccaccagattgaggatatcgccgaactgcaggctgatatcgccactggcgaccagttcgaccccggcacggttcaggcggctgataacaacgtcatagcgttctttaaagtgcaggtcgcgaatacgttttccgagcacgttttcattggtgaccaccacacgctcgacgcgcaaatcagtgcctttcgtggacaggctagtatcgacctcctgaccaatcaccagttgcgcattatgtaaatccgctggctgacccaccagatgcagcaaatcgcccagttggataatggtatctgggctaggaacttttagggtttcttcgcgtttcagacggctgcagataattttgtcgccgttgagaatcggtacatctttaatggctaaatcatgcaggttagggttctcaacgcgaatattgatagtcttgatcagcgcgccgccattggtgcgactagactcgtgctgctgagcttctgtctcgacattgacgcggaaaataacccgcaacatccacatggtgaacaaaatcccgcaaatgccgaatggatacgccatcgcgtaactcatccccatctgatcgaccatttccattggtgtacccaggtcgcgcaaaatctgctgccctgcccccagcgctggcgtattggtaaccgcaccggagaaaatccccagcactaccggcagtggaatatcaaacagtttatgcaggatggcggtaaccagaccaccgatgatgacgatcagaacagcaaacaggttgaggcgtaatccggagacgcgcaaactggcaaagaagcccggccctacctgaatcccgatagtataaacgaacaggatcaggccaaattcctgaataacatgcagcatatcgctacttaatgtcatccccgcctgagaaacaaaatggccgacgatgatcccaccaaacagcacgccgccaatacctaatcctatgccgcgaaatttgacgttgccgataaacaaaccgacgactgccaccaaagccagaatactgaccgttaatgctatatcactcatcgtccatttctcttgagataacattttaattgctacggattatggctgaatcggtgaagcagatttgccttatagcgcacattatcacgggaaagaacgtgccgaaatatcttaaacagtcgaaatttaacgcattgttgagtaagtaagacaaaaaaagccccaccagaatggcggggcaaagagaatagctagttagctatttaacgcgggacgttcgctgatagcgatacgctgcgctgcgatgggttcaggctcattacgaattaaatcaatatgcagtaaaccgtttacgaaggttgcgccagagacttccatattttcagccagcgtaaagctcaggctaaatggctgattcataagcccttgatgcagccattttttctcttcttttggctgctccggcgtgccttttacgctcaggcgcgtaccttccagttgaatctctaaatcttcctgacggaaacctgccagcgcaagggtaatgcggtagtggttatcgtcgcttttctcaatgttgtacggcgggaagctctggctttcaccggcgttttgcagtgcgttggccagtttgtcaaaaccgatccattgacgcatcagtggggataaatcgaagttacgcatagtcatttctccttctaagaagcgagtaagtacctgcaaatccgaagattcgcatatgctccctgacggcgagcatggagatgtcaggccgcgccaggcggccttagggaattagttgatttcgatacggcgcggttttttcgcttccggaatcacgcgttcgagatcgatatacagcaaaccatttaccaggttagcaccacgaacatgaatgttctcagctaactggaatttgcgttcaaagttgcgttcagcgatgccctggtacagataggtgcgctctttttgttcgtcggcgtgagcacctttcaccaccagcagattatcctgggcggtaatttccagttcgctctcagcaaaaccagccacagcgatagcaatgcggtaatggttttcgtctaccagttcaacgttatacggagggtagccgccattactctggctctggttgttttctaagtggttaaacaaacggtcaaatccaatagcagaacggtaaagcggggataaatcaaagttacgcataatcaatagctcctgaaatcagcgagaatgtaagaccttccacaatggacaggtcaggtagccagaacacccatcaggcgcgtcctcatcggctacgatgtaaaaatgggtctggaaatgaacttttcaagccttatcagcggacttttttttgcagtttatggtctattgcatagactgagggggcagcacgaaacgttaaagtgcgatagccgccacagtgcgacgtaatgatgatgttattttcagcaagggatcgctataactcatcaggccaacacccacgatcaacagatgaatttattatgataagaaatgtgttgttagcgttcatgatatgcagcggaatgacattactcggaggatgctccagcgtgatgtcccataccggagggaaagaaggaacgtatcccggcacccgcgccagcgcaaccatgattggcgacgatgaaaccaactggggcactaagagcctggcgattctcgatatgccgtttaccgctgtgatggacacgcttttactgccgtgggatgtgttccgcaaagacagcagcgtgcgcagccgcgttgaaaaaagcgaagccaacgcgcaagccaccaatgcggttattccaccggccagaatgcctgataactgatttagcgatcagtttcggtgatccacagctggccgccttccatccacgccagccactgaccatccgggctgaagaccacggcgtccgcagaaggactattggcgtggtgttcggttaaatactcaacctcgccgctttgcgcatgggcacaagcaattcgattatccagcacaaagcccaaccattctccactcggatgccagttaaatgcagactgaatatccgttttgttatgggttaactggcgcggctcgccgccctgtgggctgataagccacagttgcacaatgccgttatcatctcgcattaaaaacgcgatttgtgtaccctgcggattacagcgcacccagtggcgcgggacgttgactaaccccggataagcccgatggtgggtaaaggttaaacgtcgctgcacgacgccacgcggtggcgcgggcagggttgtttccgttccgcttaacggcgcatcacctgccgctttccagccagcttcatcttgcggtaactcaacgataaacagctccggcactttctcgccctttgggctaagtgtgtcgccaataaatgccagcgcgtgatttcctacccatccttcttcataagcacgattgatttcatcactgccaggctgtggcgtgggcgtggttttgctcaccagcacgcaccagtggctaccgctgtattcacgcggatgctgcttttgtacgttgaccgggccaaacggcgcagcaacaccgacgtttcgcaaatccagcgccggatcgagttcatgcattacatggtcgttataggtaaagctcaccctttcaccgttcgggctaaagacatgcacatggctgccgccgcgcagcactcctggcgtatacggcgcggtaatatccatcgcatcaaggttactcatcttgccgccttcaacaatcactccgcgccgatgatggaagtcgtaatgccatgtttcatcaggattttccgggccgtggatgaaaacatatttctcactcttcggatgaacggtcaccacgccgacgtgtgcgccctgactcgcgcgatagataacctcgacctcgccggtatggatattcacacgctcaatggtctcgccggtaaagctcgcgccagaaggacgcacgtcaaataccagccactggctgtcgggcgtccaggtattggtattggtgagcaggtgattacggggagcaaaggttatctgtttcatggcgcggtcctgatacaaaacgggtcccgccatcatacttcacaaggacttcactttcagacaatagtcttttgccatcgtgatgaatgtgagtgaaaagatggaacatttcgacgtggcgattattggcctcggcccggcaggaagcgcgttggcacgaaagttagcaggcaaaatgcaggtgatcgcgctggataaaaagcaccagtgtggtactgaaggtttcagcaaaccctgcggcggtctgctggcaccggacgcgcagcgatcttttattcgcgatgggctgacgcttcctgtcgatgtgatcgctaatccgcagattttcagcgtcaaaaccgtcgacgtcgccgcaagcctcacgcgtaactaccagcgaagctatatcaatattaatcgccatgctttcgacttgtggatgaaaagcctgatccccgccagcgttgaggtttatcacgacagcctgtgccgaaaaatctggcgtgaggatgataaatggcatgtcatttttcgtgcagacggctgggagcaacatattaccgcccgctatctggtcggtgccgatggcgcaaacagcatggtgcggcgacatctctacccggatcatcaaatccgtaaatatgtcgctatccagcagtggttcgcggagaaacatccggtgccgttctactcctgcatctttgataatagcataactaactgttatagttggagtatcagcaaagacggttattttatctttggcggtgcctatccaatgaaagacggtcagacgcgtttcacgacgctgaaagagaaaatgagcgcctttcagttccagtttggtaagacggtgaaaagcgaaaaatgcacggtgctgtttcccagccgctggcaggattttgtctgcggtaaggacaacgcctttctgattggtgaagcggcgggatttatcagcgccagcagcctggaggggattagctatgcgctggatagcacagacattctgcgtagcgtgttactgaagcagccagagaagctcaataccgcttactggcgcgccacccgcaaactgcgtttaaaactcttcggcaagatagtaaaaagccgatgcctgaccgcaccggctttaagaaagtggattatgcgcagtggtgtggcacatattccacagttgaaggattaaccaacgcgcttcacatcgcccaccagcaggatataagagagcgcgccaatcaacgcgacggcggagatataaaccagtgcaggtgcgaaaccgtaaccctgcgccaggtaccccaccaccagcggaacggtgatgccgcccagaccaccggcgaagttaaacacgccgccggttaaaccaatcaggcgcatcggtgccagagaagaaaccaggctccaggtaatgctagcaaaaccgttaccgaagaatgccagcgccatcaggcacataatcatcatcggatcgttagtgtagttagcgcccataatgcaggtggagatcagcaagccgcagataatcggcgttttacgcgcaaagcccagactaaagcccttacgtaccagcagatccgctacccagccagagagcaggacgccgacaaacgccgcgaggaatggcaccgtggtcataaagcctgctttcagcgccgtgattcctttttcctgggttaaatagttcgggaaccaggttaagaaaaaccacagtgtagaagccaccgcaaattgcccaagataaacgccgatcagtttacgatggaacaccagtttccagtctttggctgttaacggctgacgcgcctctttcttcaccggcgcatcaccatccaccagaccgccgccatcacgaatgtaatccagttcagctttgctgatacctttggtcaggcgcggcggctgataaaccttaaaccaaatcaggctccagataatgccgataccaccagtgacaatgaacacccagtgccagctcaacatctcctgaatccagatcagcagcggcgtcagaaacgccagaccgacaaactgaccagacgtataaaaaccaacggcagaagcgcgttcatgttccgggaaccagctggtcaccatccggttattggtcgggaaagcaggcgcttcgaaaataccggttatcgcgcgcagaccaattaaactcattaagcccgtggcaaagccctggaataaagtcgccacactccagccaaatatcgcaataaaataagtcacgcgagaacctacgcgatctaaaaaccaaccgccggggatctgacatagcgtataaagccaggcgaaggcgctaaatacatagcccatttccgctttggtaatgccgaactcttcctgaatatgggcggaagccacggccaggttggcgcggtcgacataacaaatgactaccgtaataaagatcatcaccagcgtcagataacgccgacgccccggctttgctgcattaacgggaatatccatagcgagctttctccagattttgggcatagcgaagccgctcaccatgccctgtaatttacagagggttatatttttgtattgctgttttagtgcccgatgaggggcttacgtggcaggaattaccactctgctacgctgttatcttcatgacgccagagcggattacgccagtccggggcatttttactgaactcaatcactttagcttcgtcgatttccacgcctaagcccggtttcgttaacggtttaaagaagccgccgaccatgctgaagtcttctttgtttttcacaaagtcgagtaactccgcgcctttgttgtaatgaattcccatactttgttcctgaagtacggcgttataggaaacaaagtcgatatgcaggcaagccgccagtgcaatcggtccgagcggacagtgcggcgcaagggtcacgtcataggcttctgccattccggcgattttgtagcattcggtaataccgcccgcgtgggagagatccggttgcagaatgctaataccacctgcctccagcacgcgtttaaaatcgaagcgactgaacatgcgttcacccgccgccagtggaatatgcgtttgtgccgccagtttcgggtagtattcggcttgttccgccagcaccggctcctcaataaacagcgggcgatacggctccagttctttaatcagcactttcgccatcggcgcgctgacgcgaccgtggaaatcaagaccaaactcaatctgattgccaaaagcttcacgaatttgtgccacggtgttaaccgccgcatctaccgcgcgggagttatcaattagccccagttcttcacaaccgttcagtttgaaggtatcgaagccgatttcgcgtagcgttttaatgccgtcgataacatccgccggacgatcgccgccaacccaactgtaggctttaattttgtcgcgaaccaggccgcccatcagttgccagaccggcgcattcagcactttacctttgatatcccataacgcctggtcaatcccggcgatggcgctcatcaggatcggaccgccgcgatagaatccggcgcgatacatcacttgccataagtcattgatgcggcttggatcctgaccaatcaaatagtcacccagctcgtgaactgccgcttccaccgtacgggcgcggccttcgatcacgggctcgccccaaccgaccacgccttcatcggtttcaattttcaggaacatccagcggggaggtaaacgatacgtggtaattttggtgattttcattgcactgcctctcgatacgccttaacaaatgctgctgcctgctgcgcggtgcgctctacggattgcccggcgcgatagagatcgctgcctaagcccgcccctgcacaacctgcgtctatccactgcgccaggttttctggcgtcacgccgccaacggcaaagactgcgatgtcgcttggcaataccgcttttaacgctttgatgtattgcggaccaaaagcgctactcggaaatattttcagcgcctgcgcgcccgcttcgagcgcggtaaaggcttcggtcgccgtcgcgcagccggggcagacggtcatgccgtagcccaccgcacggcggatcacttcactatggatattgggcgtaacgatgagctgacagcccatcctggcgagcgcatcgacctgttcaggtttcagtaccgtacctgcgccaatcaacgccttgtcgccgtacgcatcaacgatggcgggaatgctttgctcccattgtggggaattcagcgggatttcaaccgcgtcgaacccggcgtcaatcaccgcgccaacatgcgccagcgcctcgtcgggcgtaataccgcgcaaaatggcgatcagcgggagtttagtttgccactgcatgagcgatgctccttataccagcctgaaatgccgtgtcgcccgccaccgccgtcacgtcgcaacccatcgcctgaaaggcttgctggtagcgcgcggtcaggcttgttccggcgacaagggtgatggcgtgttgatgggccacatagtcgcgcatactggcgacctctgcgccaatcaacaaaccagagagaaattcgctgacctgttcgcggggaagtgttcccagcacatggctggcgcgaacttcaaaaagctgcggcaatatggcgggcgtattaagaccacgctcaaggccagctgtgaaggcatcggcagagttttcctgcggcggcaaacctgcgccaatcaaactgtgatttaacagtaaatgatgtaattcaccggtcatcacggtgcgaaaatcgttgatttgctggctatcggcctgcacccatttgcaatgggttccgggcatgacataaagagaggaaggagccagagctcgcgcgccgatcaattgtgtttcttcgccgcgcatcacattgtggttatcgtcatgagagacacataatccgggaataatccagatattgtcgccaacactcgttaattgttcgccaatagagctaaaacaggcaggaacagataaatacggtgcaactttccagccgacgttgctgccaaccattcctgccattaccactggcgttttctcttcacgccagtcggtcgtgacttctgctaacaccgcagccggagattttccgttcaggcgcgtgacgcctgcttcactttgcctgctctccaggcagtggtcgccctgataaagccaggcgcgcagattggtgcttccccagtcaattgcgatgtagcgagctgtcatgtgatttcctttaaccttcgtgtgctgctggcgatcatggtaagcgccgcctgctctgccgcatcgccgtcctgatgtcgtatcgcatcgaacagcgccttatgttcctggagcgtttgcggcatgttggcctcatcgcccatccaggttcgttcaaaaaccgcccgctgcaggctactgatcgcaatgctaagttgctgtaacaccgggttatgcacgctctgcagcaccgcctcgtggtagcgaatatccgcttcgttaaacgcttcgcggtcctgattgttggcaatcatctcgttcagcgcgctttcaatctgcgccagatcgctggaagtcgcgcgctctgctgcccaacgggcaatcgccggttccaccagatttcgcacttcgctcatggcactgataagccgtgggtcgtagtcattttccagcacccattgcagtacgtcagtgtcgaggtaattccactggttacgcggtgccacaaacgccccgcgataacgtttcatttcaatcagccgcttcgccatcaggctacggaacacctcacggatgatgttgcggctggttgcaaactcctcacagagttccgcctcagccggaagcgggctgcctggcacgtatttgccgtgaacgatctgtttacccagcgtaatgacaatgcgatcggttttattgagagtcatggagagtccttgtgctctgtatgttcttctctactttaccccgatcgatgcataacgcggcaactttgtagtaccagcgtgatgacgttcgcgtttgccgtgcgtgtaatgtagtacaaacttatattgttgtactacaatttagatcacaaaaagaacaatgcataaaaaaatgacatgcgtcgggcagaaatctgaaaagggatatcaggcgctaaacaggagggaaagaagagtatgctttcaacggcttagctactcgtttaaaggattaatcatgaagttgaattttaagggattttttaaggctgccggtttattcccactggcgctgatgcttagtggctgtatcagctatgctctggtttcccataccgcaaagggtagtagtggaaagtatcaaagccagagtgacaccatcactgggctaagccaggcaaaagatagtaatggaacaaaaggctatgtttttgtaggggaaagcctggattaccttatcactgatggtgccgatgacatcgttaagatgctcaatgatccagcacttaaccggcacaatattcaggttgccgatgacgcaagatttgttttaaatgcggggaaaaagaaatttaccggcacaataagcctttactactactggaataacgaagaagaaaaggcactggcaacgcattatggttttgcctgtggtgttcaacactgtaccaggagtctggaaaacctaaaaggcacaatccatgagaaaaataaaaacatggattacagtaaggtgatggcgttctaccatccatttaaagtgcgattttatgaatactatagtcccagaggcattccggatggtgtttccgcagcattactgccagtgactgttacgctggacatcattactgcaccgctgcaatttctggttgtatatgcagtaaaccaataatcagtaagcgggcaaacgcgtttatgctgtttgcccgcccacagattaattcagcacatacttctcaatagcaaacgccacgccatcttcaaggttagatttggtgacaaagttcgccacttctttcacactaggaatagcgttatccatcgccacaccgacgcctgcatattcaatcattgcgatatcgttttcctgatcgccaatcgccatgatttcttccggtttaatacctaacacgtcggccagacttttcacccccgtacctttgttaacgcgtttatcgaggatttcgaggaagtacggcgcacttttcagcacggtatatttctctttcacttcctgcggaatacgcgcgatagcctggtcgaggatggcgggttcatcaatcatcatcactttcaggaactgggtattggggtccattttctccgcttcgcagaacaccagcggaatggtggcaacgaaggattcatgcaccgtgtagtagctgatatcacggttggcggtgtacagcgtggtgcggtccagggcgtggaaatgagaaccgacttcgcgagagagtttttccaggaaacgatagtcgtcatagctgagagcagtttgcgccacggtgctaccatcagcggccttctgtaccagcgcgccgttataagtaatgcagtagtcgcccggctgttccatatgcagctctttcaggtagttgtgcacacctgcatacgggcgacccgtcgttagcacgacattcacgccacgggcgcgagctgcggcaatcgcatttttaacggcgggactaatggtgtgatcgggcagcagaagggtgccatccatatcgatagcaatgagtttaatagccatgagttccccaggtagattggttcctgacccatgctaacgcgattccgctcaaaaatcagtacaacacccgagggaaaagggggatgcaacgcgcgttgcgtgctccctttttgcttagcggaagagtttccctttcagcagttccatgcctgcggaaagcagatcgttattggcttgtggactcacttcaccttgcggactgagcgcatcaataatcttcggcaattgttctgccagtaaactggaagctgtactggtatccacgccaagtttttgcccgagatcggacaccgcatttgtgccgagcgcgctttccagttgctcgccactaacgctttgattgccctgttgattactcagccaggtactgagaatggcccctaagccgccactttgcagtttttccagcagcacctgaatgccgccctgctcctcaacccaacttaaaatagcctgatatttccccgcatcgcctttcagaaaggcaccgacaacttcatcaaaaagccccatgataatcacctgtaaagcgttacgtgttgacccaaaaagtatagatttgcgggatgataattgcggattgcagaaataaaaagggcggagatgatctccgcccttttcttatagcttcttgccggatgcggcgtgaacgccttatccggcctacaaaatcatgaaaattcaatacattgcaagattttcgtaggcctgataagcgtagcgcatcaggcacgctcgcatggttagcgccattaaatatcgatattcgccgctttcagggcgttctcttcaataaacgcacggcgcggttcaacggcgtcgcccatcagcgtggtgaacaactggtcggcagcaatcgcatctttaacggtaacgcgcagcatacgacgactttccgggtccatagtggtttcccacagctgttccgggttcatctcgcccagacctttataacgctggatggagaggccgcgacgggactctttcaccagccagtccagcgcctgctcgaagctggctaccggctgacgacgctcgccacgttcgataaacgcatcttcttccagcaagccacgcagtttctcacccagcgtgcagatacgacgatattcgccaccggtgataaactcgtgatccagcggatagtcagtatccacaccgtgggtacgcacgcgaacaatcggctcgaacaggttttgctcagcattggtgtgaacatcaaacttccactggctgccgtgctgttctttgtcgttcagttcgctgaccagcgcgttcacccagcgggtaacggtctgctcatcagaaaggtcagcttccgtcaacgtcggctgatagataagctctttcagcattgctttcggataacgacgctccatacgattgatcattttctgcgtcgcgttgtactcagataccagtttctctaacgcttcgccagccaatgccggtgcactggcgttggtgtgcagcgttgcgccgtccagcgcgatagagatctggtactgatccatcgcttcgtcgtctttaatgtactgttcctgcttgcctttcttcactttgtacagcggcggctgagcgatgtagacgtgaccgcgttcaacgatttccggcatctgacgatagaagaaggtcaacagcagcgtacgaatgtggctgccgtcgacgtccgcatcggtcatgatgatgatgctgtgataacgcagtttgtccgggttgtactcgtcacgaccgataccacagccaagcgcggtgataagcgtcgccacttcctgagaagagagcatcttatcgaagcgcgctttctcgacgttgaggattttacccttcagcggcagaatcgcctggttcttgcggttacgcccctgcttcgcagagccgcccgcggagtccccttccaccaggtacagttcggaaagcgccggatcgcgttcctggcagtctgccagtttgcccggcaggcccgctaagtcgagcgcacctttacggcgggtcatttcacgcgcgcgacgcgccgcttcacgggcacgggcagcatcgataattttgccaaccacgattttcgcgtcggttgggttttccagcaggtattctgccagcagttcgttcatctgctgttcaaccgcgcttttcacctcagaagaaaccagtttgtctttggtctgggaggagaatttcgggtccggcactttcacggaaacgaccgcaatcaggccttcacgcgcatcgtcaccggtggcgctgactttggcttttttgctgtagccttctttgtccatgtaggcgttcagggtacgggtcatcgccgcacggaagcctgccaggtgagtaccgccgtcacgctgcggaatgttgttggtaaagcagtagatgttttcctggaagccatcgttccactgcaacgccacttcgacgccaataccgtctttttcagtggagaagtagaagatattcgggtggatcggcgttttgttcttgttcagatattcaacgaacgccttgatgccgccttcatagtggaagtggtcttctttgccgtcgcgcttgtcgcgcagacgaatggaaacgccggagttgaggaagctcaactcacgcagacgtttcgccagaatttcatattcgaactcggtcacattggtgaaggtttcgaggctgggccagaaacgcaccatggtgccggttttttcagtctcgccggtaaccgccagcggggcctgcggtacaccgtgttcgtagatctgacggtgaattttaccctcgcgctggataaccagctccagtttttggctcagggcgtttactacgctaacaccaacgccgtgcagaccgccggacactttataggagttatcgtcaaatttaccgcctgcgtgcagaacggtcatgatcacttccgccgcgcttacgccctcttccgggtgaataccggtcggaatgccgcgcccgtcatcctgtacagagacagagttatcggcgtgaatggtgacgataatttctttacagtgacccgcgagcgcttcgtcgatagcgttatctaccacctcgaataccatgtggtgcagaccggtgccgtcatccgtgtcgccgatatacatacccgggcgcttacgcaccgcatccagccctttcaggactttgatactggaggagtcataagaattgctcatcaacgtttctcgctcatttatacttgggttaatccgttattttacccttttccacggtaaacatcttgctattttcgtcgctcatgtctataacgtgttcagcactgatcgcgctgacaaagacctgactttgcgtcgcttttaagcggctggcaagcagcccgcgacgctcatcatcaagctcagaggcaaaatcatctatcaggtagagacaccgccgcccgctttcacgggtgaggaactctccttgcgccagacgtaaggcgcacatcaacagcttaagctgcccacggcttaaggtatcttccaccggcgcaccgtcggcgcgaatgcgtaagtccgctttgtgcgggccgtgcgcggtgtaggttagctggcgatcgcgttcaaaattacgttccagcacctcagcatattctgtctctttctcccagccgcgctggaaagagaaagtcagagaaaactcagggagaaattgcttacaggtatcagccatatcggccgcgataccggcgctatactccgcgcgccaggtgctgatttgctccgccagcgggatcagctctttatcccacgggcgtagctgttcgtaacgtgtcacctggcgcagcgccgcattgcgctgcttgagcaatcgcttgagattgctccaggcggtgaaaaatccgggttcgttgtgaaagcatccccagtcgaggaatgctcttctgtatttggggccgccgttgagtaaagtaaacccttctggcgttatcaactgcattggcatcaggtgcgccagttccgcgaccttatgcccgtctgtaccgtcgatgcggactttgctgtcgccctgtttgtctttggttaagccaatcgctgtctcgcgctcttcgccctgtaatcgcccgtggagaacaaacgcctcctgctcatggcgaatgacgcgaccaatctgcaaactgcgaaacgcccgaccatggccgagcgtatagatggcttccagcacgctggttttgccactgccgttggcgcctaccagaaagttaaagccgggagataaggcgagatccgcggtttcaatgttgcggaaatcgcggatcaacaagcgggtgagggacattacagtctcattggcatgacaacataagccgcgctctggctggccgcatcttcaatctgcacgctggaaacgctatcggtcagcatcatgcggacgttttcgcatttcagcgcgttcagaacatccagcacataactgacgttgaagccgatttccatctccgcaccgctataggtaacgtcgaggatctcttccgcttcttcctgttccgggttgttggcggtgattttcagctggttttcgctgacataaagacgtacgccgcggaatttctcgttagagagaatcgccgcgcgagcaaacgcctgcttgagcagatcgcagccagcttccagatgtttgtccgggttcttcggcagaacgcggcgataatccgggaagcgaccatccaccagtttggaggtgaagataaagtcgccaacgtgggcgcgaatgttgttgctgccaatctgtacgcgcagcggattgtcgccgccgtcgagcatacgcatcagttcaatcacgcctttacgcggtacgatcacgctatggcttggcaaagattgaccaattggcatactacagaccgccagacggtggccgtcggttgccacggtgcgcagttcttcaccttcggtttcaaacagcataccatttaagtaatagcgaacgtcctgatgcgccatagaaaactgggtcgcttcaatcagacgcttcatcgttgcctgcggcagggtaaattcgacttcactctgccagtcatcgaggttcgggaaatccgccgctggcagggtagacaggctaaaacggctacgcccggagcgtaccagcatccgttcaccttccagctgcacggcaatttccgcgccttcaggcagaccacggcagatatcaaagaatttgcgcgccggaacggtcgtcgctcctggctcgtgtggctgaaccagcgcaacacgtgccaccatttccatctcgagatcagtaccggtcaggctcaacgtaccgtcagcaacctgtaacagcagattaccgagaatcggtagcgtaggacgaccacctaacggaccgctcacctgttgtagcggttttaataaatgctcacgttctacggtaaatttcataggtttagctactcaatgttctgattaaattactaaaatcttctttgatatcgtggctctcttcacgcaactgctcgatcttacggcaggcatgaagcaccgtcgtgtggtcacggccaccaaacgcatcgccaatctccggcagactgtggttagtcagctctttcgccagcgccatcgccatctggcgcggacgcgccacgctgcgggatcgacgcttggaaaggagatccgcgactttgatcttgtagtactccgccaccgtcttctgaatattgtcgatggtgaccagtttttcctgcaatgccagcaagtcgcgcagcgcctcacgcacgaagtcgatggtgatcgcccgtccggtaaagttggcattggcaatgacgcggttcagcgccccttccagctcacgtacgttagatcgtagacgcttggcgataaagaacgccacttcgcccggcaaacgaatgtcgttttcgtcggcctttttcatcaggatcgccacacgggtttccagctctggcggttcgatcgccacagtcagtccccaaccgaagcgggatttcaaacgatcctcaacgccgttgatctctttcggatagcgatcgctggtgagaatgatctgttgattaccttccagcagggcgttgaaggtgtggaaaaactcttcctgagatcgttctttattagcaaaaaactgaatatcgtcgatcagcagtgcatctacggaacggtagtagcgtttaaactcttcgatcgcgttgttttgcagggctttaaccatgtcctgaacaaagcgctcggagtgcatataaaccactttggcattcggcttgcgcgccataatgccgttacccaccgcatgcagcaggtgagttttacccagacccgtgccgccataaaggaacaacgggttataggcaccgccagggttatccgccacctggcgagccgccgcgcgcgccagttggttagatttaccttcaacgaagttatcaaacgtgtgtttgacgtttacgttagaacgataggtcggttctgccggggccgggacgttatcccaaccactgcgcgtagaaggcgcagcacgttgcggctgcgtttgcgccacctgtgcaggggccgcgacgttgctcgtcactgccgcttgtggcgtttgcgtcaccggtttggtgccgacttcaaaacgcagctgtggggcatccgctccgcagaaactggttagcagtccattgatattattaaggtacttgtcccgtacccaatcgaggacaaaacggtttggcgcgtacagggccagcgtgttatcgctcagttccgcctgcaatgggcgtatccacatactgaattctgtggctggtaactcatcctgcaatcgggcaagacactgctgccaaaggctaagactcacggcggactccactcgaacaaaagtcgataatgactaaggctgaaacattcatgattgttgacgtacgtcgaaaagaccctgcttgagggtgacgcacgaaccgctgtctgcggttatatgcccgatcaagatcctgcaaaacgatcgggaccgcggatcatagcctaaactgcgcaagagatcttctgtttctcacagattttcccgatttatccacaggactttccagaactcgctaagtgtaaacgatcctgccgcgaggcgggcacgatttacgccgcatattggaaaatttaatgaccatagacaaaaattggcttaatcgatctaataaagatccaggacgatccttgcgctttacccatcagcccgtataatcctccacccggcgcgccatgctggtttccactggtgtgaggtcgtacattttccctgcgaaaaggtgcggaaaagcgcggtaaataaggaaagagaattgactccggagtgtacaattattacaatccggcctctttaatcacccatggcttcggtgtccatcgtttcatttttcggcggatatccaataaagccattgaatttattcaagtttaggtagaaatcgccatgaaacgcacttttcaaccgtctgtactgaagcgcaaccgttctcacggcttccgtgctcgtatggctactaaaaatggtcgtcaggttctggcacgtcgtcgtgctaaaggccgcgctcgtctgaccgtttctaagtaataaagctaacccctgagtggttaagctcgcatttcccagggagttacgcttgttaactcccagtcaattcacattcgtcttccagcagccacaacgggctggcacgccgcaaattaccattctcggccgcctgaatagcctggggcatccccgtatcggtcttacagtcgccaagaaaaacgttcgacgcgcccatgaacgcaatcggattaaacgtctgacgcgtgaaagcttccgtctgcgccaacatgaactcccggctatggatttcgtggtggtggcgaaaaaaggggttgccgacctcgataaccgtgctctcagcgaagcgttggaaaaattatggcgccgccactgtcgcctggctcgcgggtcctgacttaatcggaagcgttggaaaaattatggcgccgccactgagccctggcagccgggtcctgatagccctcattcgggtctatcaacgcctgattagtccgctactcgggccgcattgtcgtttcactccaacctgtagtagctacggaattgaggcattgcgcaggtttggagtgataaaaggcagttggttgacggtgaaacgcgtattaaaatgccaccctttacaccctggtggtgacgatcccgtcccgcccggaccatttgataccagagaacactaacgatggatagccaacgcaatcttttagtcatcgctttgctgttcgtgtctttcatgatctggcaagcctgggagcaggataaaaacccgcaacctcaggcccaacagaccacgcagacaacgaccaccgcagcgggtagcgccgccgaccagggcgtaccggccagtggccaggggaaactgatcagcgttaagaccgacgtgcttgatctgaccatcaacacccgtggtggtgatgttgagcaagctctgctgcctgcttacccgaaagagctgaactctacccagccgttccagctgttggaaactagtccgcagtttatttatcaggcacagagcggtctgaccggtcgtgatggcccggataacccggctaacggcccgcgtccgctgtataacgttgaaaaagacgcttatgtgctggctgaaggtcaaaacgaactgcaggtgccgatgacgtataccgacgcggcaggcaacacgtttaccaaaacgtttgtcctgaaacgtggtgattacgctgtcaacgtcaactacaacgtgcagaacgctggcgagaaaccgctggaaatctccagctttggtcagttgaagcaatccatcactctgccaccgcatctcgataccggaagcagcaacttcgcactgcacaccttccgtggcgcggcgtactccacgcctgacgagaagtatgagaaatacaagttcgataccattgccgataacgaaaacctgaacatctctagcaaaggtggttgggtggcgatgctgcaacagtatttcgcgacggcgtggatcccgcataacgacggtaccaacaacttctataccgctaatctgggtaacggcatcgccgctatcggctataaatctcagccggtactggttcagcctggtcagactggcgcgatgaacagcaccctgtgggttggcccggaaatccaggacaaaatggcagctgttgctccgcacctggatctgaccgttgattacggttggttgtggttcatctctcagccgctgttcaaactgctgaaatggatccatagctttgtgggtaactggggcttctccattatcatcatcacctttatcgttcgtggcatcatgtacccgctgaccaaagcgcagtacacctccatggcgaagatgcgtatgttgcagccgaagattcaggcaatgcgtgagcgtctgggcgatgacaaacagcgtatcagccaggaaatgatggcgctgtacaaagctgagaaggttaacccgctgggcggctgcttcccgctgctgatccagatgccaatcttcctggcgttgtactacatgctgatgggttccgttgaactgcgtcaggcaccgtttgcactgtggatccacgacctgagcgcacaggacccgtactacatcctgccgatcctgatgggcgtaacgatgttcttcattcagaagatgagcccgaccacagtgaccgacccgatgcagcagaagatcatgacctttatgccggtcatcttcaccgtgttcttcctgtggttcccgagtggtctggtgctgtactatatcgtcagcaacctggtaaccattattcagcagcagctgatttaccgtggtctggaaaaacgtggcctgcatagccgcgagaagaaaaaatcctgattcggtgagttttcgctaaaataagggcggtcagttgaccgccttttttcttttcgtagggcggataagcaccgcgcatccgccacacaaagcaacaggaacatcatgagcgataatgacactatcgtagcccaggccacgcctccgggacgtggcggcgttggcatcctgcgcatctccggcttcaaagcccgtgaagttgccgaaaccgtgctgggtaaactgcctaagccgcgctacgccgattatcttccgtttaaagacgccgacggcagcgtgctcgatcaggggattgcgctatggttccctggcccgaacagcttcaccggcgaagatgtgctggaactgcaaggtcatggcggtccggtgatcctcgacctgctgttaaaacgcattctgaccattcccggcctgcggattgctcgccctggtgagttttccgaacgcgcgtttcttaacgataaacttgacttagcccaggccgaggcgattgccgatcttatcgacgccagtagcgaacaggcggcccgtagcgcacttaacagcctgcaaggcgcattctccgcacgggttaatcatctggtagaagccctcacccacttgcgcatttacgtcgaagcggcaattgatttccccgatgaagagatcgatttcctctccgacggaaaaattgaagcccagctcaatgacgttattgccgatcttgatgcagtgcgtgctgaagcacgtcagggtagtttgttgcgcgaagggatgaaagtggtgattgccggacgtcctaacgccggtaaaagcagcctgttaaacgcgctggcggggcgtgaagcggcaatcgtaaccgatatcgccggaactacgcgtgacgtgctgcgtgagcatatccacattgacggaatgccgctgcatatcatcgataccgccgggctacgtgaagccagtgacgaagtagaacgtattggtatcgagcgcgcgtggcaggaaattgaacaggccgaccgcgtgctgtttatggtcgatggcaccacaacagacgccgtggatccggcagagatctggccggaatttattgcccgtctgccagcgaaactgccgatcaccgtggtgcgcaataaagccgatatcaccggcgaaacgctgggaatgagtgaagtgaacggtcacgcgttaattcgtctcagcgcaaggactggtgaaggcgtggacgtgctgcgtaaccatctcaaacagagcatgggctttgacaccaacatggaaggcggcttcctggcgcgtcgtcgccacctacaggcgctggaacaggcagcggaacatctacaacagggcaaagcgcaactgttgggagcctgggcaggtgaactgctggcggaagagttgcgtctggcacagcagaacttaagcgaaatcaccggggaatttactagtgacgacctgctggggcggattttctccagcttctgtattggtaagtaaccgcgcttacgaggccgcattctgactgtcagatgcggcttcgcttcattgttaccactcctgttattcctcaaccctttttttaaacattaaaattcttacgtaatttataatctttaaaaaaagcatttaatattgctccccgaacgattgtgattcgattcacatttaaacaatttcagaatagacaaaaactctgagtgtaataatgtagcctcgtgtcttgcgaggataagtgcattatgaatatcttacatatatgtgtgaccagtaaatggttcaatattgacaacaaaattgtcgatcaccgcccttgatttgcccttctgtagccatcaccagagccaaaccgattagattcaatgtgatctatttgtttgctatatcttaattttgccttttgcaaaggtcatctctcgtttatttacttgttttagtaaatgatggtgcttgcatatatatctggcgaattaatcggtatagcagatgtaatattcacagggatcactgtaattaaaataaatgaaggattatgtaatggaaaactttaaacatctccctgaaccgttccgcattcgtgttattgagccagtaaaacgtaccactcgcgcttatcgtgaagaggcaattattaaatccggtatgaacccgttcctgctggatagcgaagatgtttttatcgatttactgaccgacagcggcaccggggcggtgacgcagagcatgcaggctgcgatgatgcgcggcgacgaagcctacagcggcagtcgtagctactatgcgttagccgagagtgtgaaaaatatctttggttatcaatacaccattccgactcaccagggccgtggcgcagagcaaatctatattccggtactgattaaaaaacgcgagcaggaaaaaggcctggatcgcagcaaaatggtggcgttctctaactatttctttgataccacgcagggccatagccagatcaacggctgtaccgtgcgtaacgtctatatcaaagaagccttcgatacgggcgtgcgttacgactttaaaggcaactttgaccttgagggattagaacgcggtattgaagaagttggtccgaataacgtgccgtatatcgttgcaaccatcaccagtaactctgcaggtggtcagccggttagtctggcaaacttaaaagcgatgtacagcatcgcgaagaaatacgatattccggtggtaatggactccgcgcgctttgctgaaaacgcctatttcatcaagcagcgtgaagcagaatacaaagactggaccatcgagcagatcacccgcgaaacctacaaatatgccgatatgctggcgatgtccgccaagaaagatgcgatggtgccgatgggcggcctgctgtgcatgaaagacgacagcttctttgatgtgtacaccgagtgcagaaccctttgcgtggtgcaggaaggcttcccgacatatggcggcctggaaggcggcgcgatggagcgtctggcggtaggtctgtatgacggcatgaatctcgactggctggcttatcgtatcgcgcaggtacagtatctggtcgatggtctggaagagattggcgttgtctgccagcaggcgggcggtcacgcggcattcgttgatgccggtaaactgttgccgcatatcccggcagaccagttcccggcacaggcgctggcctgcgagctgtataaagtcgccggtatccgtgcggtagaaattggctctttcctgttaggccgcgatccgaaaaccggtaaacaactgccatgcccggctgaactgctgcgtttaaccattccgcgcgcaacatatactcaaacacatatggacttcattattgaagcctttaaacatgtgaaagagaacgcggcgaatattaaaggattaacctttacgtacgaaccgaaagtattgcgtcacttcaccgcaaaacttaaagaagtttaattaatactacagagtggctataaggatgttagccactctcttaccctacatcctcaataacaaaaatagccttcctctaaaggtggcatcatgactgatcaagctgaaaaaaagcactctgcattttggggtgttatggttatagcaggtacagtaattggtggaggtatgtttgctttacctgttgatcttgccggtgcctggtttttctggggtgcctttatccttatcattgcctggtttagtatgcttcattccgggttattgttattagaagcaaatttaaattatcccgtcggctccagttttaacaccatcaccaaagatttaatcggtaacacctggaacattatcagcggtattaccgttgccttcgttctctatatcctcacttatgcctatatctctgctaatggtgcgatcattagtgaaacgataagtatgaatttgggttatcacgctaatccacgtattgtcgggatctgcacagccattttcgttgccagcgtattgtggttaagtagcttagccgccagtcgtattaccagtttgttcctcgggctgaagattatctcctttgtgatcgtgtttggttcttttttcttccaggtcgattactccattctgcgcgacgccaccagctccactgcgggaacgtcttacttcccgtatatctttatggctttgccggtgtgtctggcgagttttggtttccacggcaatattcccagcctgattatttgctatggaaaacgcaaagataagttaatcaaaagcgtggtatttggtagcctgctggcgctggtgatttatctcttctggctctattgcaccatggggaatattccgcgagaaagctttaaggcgattatctccagtggcggcaacgttgatagcctggtgaaaagcttcctcggcaccaaacagcacggcattatcgagttttgcctgctggtgttctctaacttagctgttgccagtagcttctttggtgtcacgctggggttgttcgattatctggcggacctgtttaagattgataactcccacggcgggcgtttcaaaaccgtgctgttaaccttcctgccacctgcgttgttgtatctgatcttcccgaacggctttatttacgggatcggcggtgccgggctgtgcgccaccatctgggcggtcattattcccgcagtgcttgcaatcaaagctcgcaagaagtttcccaatcagatgttcacggtctggggcggcaatcttattccggcgattgtcattctctttggtataaccgtgattttgtgctggttcggcaacgtctttaacgtgttacctaaatttggctaaatccttcaagaagccagccattcgctggcttcttgcctctcaggaaatcacttatgtccaaatggcaactcgcctgatcctccttcaccacgtatgctttgcgtcaccttactatcaggacgctttagcccatgtcccgctttttgatttgtagttttgccctggttttactttatcccgccgggattgatatgtacctcgttggtttaccgcgcatcgccgccgatctcaatgccagcgaagcgcagttgcatattgcgttctccgtatatctggcggggatggcagctgcgatgttatttgccggtaaagtggccgatcgtagtgggagaaagccggtcgccatacccggcgcggcgctatttattattgccagcgtgttctgtagtctggctgaaaccagcacgttatttcttgcaggccgatttctacaggggttgggcgcaggctgttgttacgtagtggcgttcgctattttgcgcgacacgctggatgatcgacgtcgggctaaagtgctgagtttactcaacggtattacctgcatcattccggtgttagcgccagtgctcggacatctgattatgcttaaattcccgtggcagagtctgttctgggcgatggcaatgatgggcatcgcggtactgatgttgtctttgtttattttaaaagaaacgcgcccagcggcccccgcagctagcgataaaccacgagaaaatagcgagagcctgcttaaccgttttttcctcagccgtgttgttatcaccaccctcagcgttagcgtgatcctcactttcgtcaacacgagtccggtattgctgatggaaatcatggggtttgagcgcggtgaatacgccaccattatggcgctgaccgctggcgtcagcatgaccgttagtttctccacgccatttgcgctgggaatttttaagccacgtacgttgatgatcaccagccaggtgttattcctggcggcggggatcactcttgccgttagtccttcccatgcggtttctctgtttggtatcacgctgatttgcgccggtttcagcgtaggttttggtgtggcgatgagtcaggcgttagggccgtttagtttacgcgcgggcgtagccagcagcaccttaggtattgcgcaggtttgcggtagcagtctgtggatttggctggcagcggtggttggtatcggcgcatggaatatgctgatcgggattctgattgcctgtagcatagtgagcctgttgctgattatgttcgtcgcgcctggacgccccgttgccgctcatgaagaaatccatcaccacgcttgatctcaatctgctgctttgtctgcaactgctgatgcaggagcgcagcgtaaccaaagcggcgaagcggataaacgtgacacctagcgcggtgagtaagagcctggcaaagttaagagcgtggtttgacgacccgctctttgtgaacagtccgctgggtctgagccccacaccgctgatggtcagcatggagcaaaatctggcggagtggatgcaaatgagcaacctgctgctggataaaccgcaccaccagacaccgcgcggcctgaagtttgagctggcggcggaaagtccgctgatgatgatcatgcttaatgcgctgagcaaacagatctaccaacgttacccgcaggcgaccatcaaattacgtaactgggattacgattccttagatgccattactcgtggtgaagtggatatcggtttttccggtcgcgaaagccatcctcgcagccgggagctgttaagcagcctaccgttagccattgattatgaagtgctgtttagtgatgtgccctgcgtctggttacgcaaagatcatccggcactgcatcaaacgtggaatctggacaccttcttacgttatccgcatatcagcatttgctgggaacagagcgatacctgggcgctggacaatgtgttacaggagctgggacgcgaacgcacgattgctatgagcctgccggaattcgagcagagtctgtttatggcagcgcaacccgacaatctgctactggcgaccgcgccgcgctactgtcagtactacaatcaactccatcaactgccgttggttgctcttcctctcccgtttgacgaaagccagcaaaaaaagctggaagttccttttaccctgctgtggcataaacggaacagccataatccgaagatcgtctggttacgggaaaccattaaaaacctttacgcgagcatggcataaccgaatcgtatgaaacgcgacccaatttcacaataaaatgtaaaaaagttgtaataagcttgtctgaatcgaacttttagccgctttagtctgtccatcattccagtaaatgattactcttgtattcataatggaccattaagcatggagcgaaaaatggcgactcactttgcccgagggattttaacggaaggacatctgatttctgttcgtctcccctcccagtgtcatcaagaagcccgaaacattccccctcatcgtcaaagccgttttctggcgtccagaggtttactcgcagaactgatgttcatgctgtatggcattggcgaattgccggaaatcgtcaccctgccgaaaggtaaaccggttttcagtgataaaaatttgcctagcttttccatttcctatgccgggaatatggttggcgtggcgttaacaaccgaaggtgaatgtggcctcgatatggaactacagcgtgcgacgcgcgggtttcatagcccacacgcgcccgataaccacacctttcccagcaatgaaagcctatggatcagtaaacaaaacgatcctaacgaagcgcgggcgcagctcatcacgctgcgccgaagcgtgctaaaactaaccggtgatgttttgaatgacgatccgcgcgatctgcagctgctgcccattgccggacgcctgaaatgtgctcatgtaaatcatgtagaagcgttatgcgacgcggaagacgtgctggtgtggtccgtggcggtcacgcccacgattgaaaagctcagtgtctgggagttagatggcaaacacggctggaaaagcctgccggatattcacagccgcgccaacaatcctaccagccggatgatgcgttttgcccaactctctaccgtgaaggcttttagcccaaattgatagacaaccacaggagtcatcatgtctgaaaaattgcaggtggttacgttactggggagcctgcgcaaaggcagttttaatggcatggttgcacgtaccctgccgaaaattgctccggcgagcatggaagtcaatgcgttaccatccattgccgacattcccttgtatgacgctgacgtacagcaggaagaaggttttccagcaacggttgaagctctggcggaacagatccgtcaggctgacggtgtggtgatcgtcacgccggaatataactacagcgtaccgggtgggctgaaaaatgccatcgactggctttcccgcctgccggatcaaccgctggccggtaaaccggtattgattcagaccagcagtatgggcgtgattggcggcgcgcgctgtcagtatcacctgcgccagattctggttttcctcgatgcaatggtgatgaacaagccggaatttatgggcggcgtgattcagaacaaagttgatccgcaaaccggagaagtgattgatcagggtacgctggaccacctgaccgggcaattgaccgcatttggtgagtttattcagcgagttaagatctaaataaaaaacccgccagcaatcatgcatggcgggtttttaacgcgctatcgattttagtgagcgtcgataaagacaatcttcaggataaacagcagcgcaacgatgattacgcacgggcttagatcacgcagacgtccggtaccgattttcatcacgcagtaggagataaagcccagcgcgataccttcggtaatgctgaagctgaacggcatcatcacggcggtaataaacgccggaacagattcagtaagatcctgccagttcacgcgtgccagactggaagtcatcagcacgccaacgtaaatcagcgcaccagctgcagcgtagcctggcaccatccccgccagcgggctcagaaagataaccagcaggaacagcagaccaacaaccactgccgtcagaccggtacgaccgccaacgcttacgccggaagaggactcaatataagccgtaacggaagaagtaccgataaagctaccggtcacggaagagatactgtcgacatacagcgcctgcttcatgcgcgggaatttccccttctcatccgccagacctgctttatcggtcacgccaatcagcgtaccggaggagtcaaacaagttgaccaacatgaaagagaaaatcacccctgccagcccgaggttaaagctcccggctaaatctacatgacccacaactgtcattacgctcggcggcgcagaaacgatgccattgtagtgcacatcacccagcatccagcccagcagcgtcgtcaccacgatagaaaccagcaccgctgcgtgaatgttgcggctggccagaatagcaatgatgaagaagccgaggatacccagaagtacgctgtgagaagtcagattaccgatgctcaccagcgtttccgggttagcgacaatcacacctgcgtttttcagccccatcatgccaatgaacagaccgataccgctggtaatacccacacgcagactcaccggaatgttggctatcatccagtagcgaacgcggaaaatcgtcagtaacagcagacctatcgcgccccagaagattgcgcccatcccgacctgccacggcaagcccatcgcctgtacaacgacaaaagcgaagaacgcattcaggcccatagcgggtgccagtgcaactggcaggttagcaaacagtcccatcataatactgccgaatgcagcgatcagacaggtagtgacgaagacggcgctggtatccatgccagcaacgccaagaatttgcgggttaacaaaaacgatgtaaaccatcgtcaggaaggtggtaaaaccggcgatcacttcggtccgtgccgtcgtgccatgttcgcgcagtttaaacacgcgttccagcatcccctgaccagaagtctgggtggtatgttgatgactcattatctatttccgaacaaggagggaaaatccgtcgctatcgtataccaaaatgcgacaataggcgcgtttgtgagagacttttttattggatttacttatacggcaacgattgcgttgcgcaaatcggctctacgaaaacgttaaactgattaaaaaggaaaggcatgtcccggatagaagcggtatttttcgactgcgacggtacgctggtcgacagtgaagtcatttgctctcgcgcatatgtaacgatgtttcaggaatttggtattacgctcgatcctgaagaggtattcaaacgtttcaaaggtgtaaaactgtacgaaattatcgatattgtttcccttgaacatggtgttacgttagcgaaaacagaagctgaacacgtttaccgtgcagaagtcgctcggctgttcgatagtgaactggaagccatcgaaggggctggagcgctcctgagtgcgatcactgcgccaatgtgtgtggtatctaacggcccaaataacaaaatgcagcattctatgggcaagctgaatatgttgcactacttcccggataaactgttcagcggctacgatattcagcgctggaagccagacccggcgttaatgttccatgcggcaaaagcgatgaatgtaaatgtagaaaactgcattctggttgatgacagtgttgccggtgcacaatctggtatcgacgcaggtatggaagtgttctacttctgcgccgacccgcacaataagccgatcgttcacccgaaagtcaccacctttacccatcttagccagttacctgaactgtggaaagcgcgtggttgggatattacggcataattcttcacactcccttcacttaccccgcttaaattggcgctcaaaggtaagtaaagggagtttgatatgtctgttagtcgtcgggtaatacatcacggactttattttgcagttttaggaccgttaattggtgttctgtttcttgtcctctacatattcttcgcaaaagaaccgctggttctttgggtgataatacatccaatttttctcttattgagcataactacgggagctattcctgcgttgttaaccggtgtaatggttgcctgtctgccggaaaagatcgggagtcagaaacgttatcgttgtctggctggtggcataggtggcgtcgttatcaccgagatctattgtgcagttattgtacatattaagggcatggcttccagcgagttgtttgaaaacattctttctggtgacagtctcgttgtccgcatcattcctgcattgctggcaggtgtggtgatgagcagaatcattacccgtctacccggattggatattagttgtcctgaaacagactctttaagttaagcgggatactttatctttgggctactcaaaagcagacaggatgtttctatgactcaaaatatcaggccgttaccccaattcaaatatcatcccaagccactggaaacaggcgcatttgaacaggataaaaccgtagagtgcgattgctgtgaacaacagacgagtgtttattacagcggtcccttttattgcgttgatgaagttgaacatctctgtccgtggtgtattgcggacggttctgctgctgaaaagtttgcaggtagttttcaggatgatgccagcatagaaggtgttgaatttgagtatgatgaagaggacgaatttgccggtattaagaacacatatcctgatgaaatgctgaaagagttggttgaacgcacgccaggttatcatggatggcagcaggaattctggctcgcgcattgtggcgatttctgtgtttttatcggctatgtgggctggaatgatataaaagatcgcctcgatgaatttgccaaccttgaagaagattgtgagaatttcggtattagaaattctgatctagctaaatgcctgcaaaagggtggtcattgtcagggttatctcttccgctgtctccactgcggcaagctgagactgtggggtgattttagctaattatttaaataatgagaacaggccggagcgtaattcacacatccggccttatttcttaagcttaaccgagtgctaattctgcggcagcggctttatcagcgattaccatcaggctaggatgcagctgcaacacggaagctggaacatcttcggtaaccggaccttgcagaacatttttcagtgcctgcgctttacccgcgccgctgacaattatcagcaagtttttcgccgccatgatgcttttcggccccatcgtcacgtagctgtcaggcactaagctaaagtcgccgcccaactcgccatgcgccacaatatcaaccatctctccctggatcgggaactccacggtttgctcatggaaatgggtcgtattcggcaaattgccacaaaaatgaccatctgcacctaatcccagcaccaccaaatccagtccgccttcacgcgccagtttctgatcatgctcgcggtagttatcaatagtgagcttctggatattctcttctttgatccccgcaggggtgaaaaacagattacgcagattggtaatcgttacgccttctccctctttgccgcgaaatggaatttcatcaaaattatagaaatagcagttatcgtaccagggcttacctttaaccagggtggtgaggtattcatacatgcctttgggcgtgctaccggcggtaattgccaggttaacacgacgcgtcttgctcatataaccaagcagatggtgtgccgcgacacggctcatttcctggtaatcttcggtaatgattaatttcatcttaatgccttattttatttaaataatttctgtacaaaggctgcataggctggtcgccagacatccatttcatggttcagacccggatattcctggtaatcaaagttaatttttttctgctcaagctcagttttcagcccggcgatatccttgccggttacgacatctttatcccccacaaccacagtaaaattacgtagttgctggttgatagctgccggatcgttcagtcgggccgcgacaccttcatccggtacggttgtcgtggtaacaccactgaatgtggccagccagccaaagctttccagatgattcattccggaaaccagcgcctggtacccgccttgactaagccctgccagcgcgcggccatcggcatctttacggacattaaaacgcttgctaatcagcgggataatatcgttcatcagttcgcgatctgccgctttagcattcagcggataaaagactttacgtctttcctgaggcacgaaatcttcgggaataatgcccttcgcatcggtttctgtatccgggatcaccaccagcatcggtttaattttcccttcagcaagcaggttatccatgatttgcgggatacgcccctgatcgatagcggaacgtccggtatcaccaaagccgtgatagaaatagagcactggcaaaggctcgcccatgccggtgtatcctggcggggtccagacatacatctgacgttcagattgcaatgcgttggagtggtaagttatggcgatcaaatcaccatgcgcaacagaacgcgtatccagataactgcctggcaccagaatcatactggagttaacctggcgctgaggattagtcattgcggtgcctgtatcaatgctgcgtacaccatcaacattgaaaaaatactcgtacaggttgcctttcaggataggtgtgcgccagctccagactcctgcttcgtctttggtcatcgggtgaatattgtccggaaccggaacacccaccactacagagacattttttgccccaggggcaaagtagcgaaaggtcacgctgttatcggcattgacctgagtcacatactgtttcaccgggatagtgggtgccgggctggctggcatatccgctgctatggcccactgagcagaaataccgctggcaatagccagcgttaaagcagcaatttttatattcatcgtaatattcctttcattaagttccattaccaccagatttcagcctgggcaccgacagcaaactggtcgtctttattgtcttcaaaggtgaagccatccagttcgttttccagggctttgatatacgtggcgtagaaacgaatttccggacggctggtcaacatactggtattgactttaaaggtatggaagagcgtggttttataaccagactcattaaatttattactattcgcatctttgttttgctgggtgaaatagcccagttcaacacctgtctggttatattggtcccaaatataggccgggcgaacaaccgcacgaatagattcgaaatcagagtgggcgcctgtttcgtagctatatatatcgttaccgaaggagtaaacaatcgcgttagctacaatgaaatgatcgccaatataggcttcgccctggctagtcagacgtaccgctgttccgccggtgtgatcaccataataacgaccattaaaggtggtaaatggacttgcgccagcataacggccaaagttactggcgatagagttattcgcgaccaggaaggagaattcgttgaagccacctttatcaaatttctgcgttaaagatgtgccaaacatccaggtatctttccagtcataatacccgttattatcctgattatctttttcgcttgcgctttcgtttgccgtgacataacgaccacttaccattaaggtggctttatcccataacgggatatctttatagcgtaaatcaatggtattggtattaatctgctgtttgttttgcaggctgcgatcgtaatcatcgacatcttcgcgaaccagcgcgatatcaattttacccggaccgactttccagttttccagacctacacccgctgcggcatcagtacgctgcgttttccagtcaagcatctggatttcaattttcggcgcaccgtgtttacccacccagaaatcagcctctggcgcaaagggcaggaaacctttggtggtaacgtacatatcggagaactgcatatagttctcgccaccggcgttatcgccaaaccagccggtagagtactgctgaccaacgttaccatccatcatcacaacggcatcaacccgtttgccgttttcgttgtagacacgttgttttaactgcaaatcaaaccagccggagtattcgttaccaaagcggcccagagaaccaatcgcccaacttttaggactaccatgagaggcggtcccccaaccagaacggtaatagccgttgtaactaaagccaatttcatctttcacaaatttactgaaatctttcagagtcatggaagaataaatgctgcctgtctcactggcatttttctcttcatttttgaccagtacagcatcaggttttgcggcactactggtcgggaacggattggcggcatacccttgatcattcgtacttacgctacgattcaccgtcgctggcgtatactttttcttctcttcatctttatactttttgagttcgctttgcgtttctcttaacgccttttctaataactcaaggcgttgttccaccgttaaactttcagccaaactttgtgcagaaaaggctaacggtgccattaataagatggcagaggtaataagatttcgtctaaacataatatccctttatggtgcaaagaaagaattaacgcatcgcatccagactgttctgaatgcgacgataattaaggtgctttaatggttattttttttaaactcagcccccgcgtcttgatcacctctgcataccatccgaagcttttcttgcgtgttcttgtgaggcttccttcgccattatcatcacgatccacataaataaagccgtagcgcttagacatttgactatgagatgcactgactaaatcaattggcccccaactggtgtaccccataatatccacaccatcggcaatcgcttcatttacctgtaccaggtgatcgtttaaataggcaattcgataatcgtcctgtatgctaccatccgcttcaacgctgtcttttgcgcctaatccgttctcgacaataaataacggtttttgataacgatcccaaagcgtatttaacagaacccgtaatccaaccggatcaatttgccacccccactcactacttttcagatgcggattggggatcatattcagtatgttgccctgcgcatttttattaatgctttcgtcgtgggaaacacaaccagtcatgtaataactaaaagagatgaaatcgacggtatgttttaaatcttctgcgtcactttcagtcatctcaatggtgatattgtggtcgcggaagaaacgctgcatatagccgggatactggccacgcgcctgaacatcaccaaagaacatccagcgccggttctcttccatggcctgcaacatatcctgtggctggcaggtgagggggtaaaccagcccaccgagaagcatattgccgattttcgcttcggggagcaggctatgacaggctttaactgcccgcgcactggcaaccagttgatggtggatagcctgataaacttccgcctcgccactctcttctgccagccccacgcccgtgaatggcgcgtgtaagctcatgttgatttcattaaacgtcagccataacgccactttatgttggtagcgagtaaagaccgtgcgggcgtaatgctcgaagtgatcgatgaccgctcgattagcccaaccgccgtagtttttcaccagcccatatggcatttcgtaatgggataacgttaccagcggcttgatccccgcctgcgccatttcatcaaacagccgatcgtaaaacgctaaccccgcttcattcggttcgacttcgtcgccctgagggaaaattcgcgcccaggcaatggaaatacgcagacaggtgaagcccatctcggcaaataacgcgatatcttccgggtaacggtgataaaaatcgatggcgacatctttgatattctctttccccaggatgcgcggttccatttttcccattacgccatgaggctgtaaatcactggtgctgatccctttgccatcttcctgccaggcaccttccacctgattggcagctgttgcgccaccccaaagaaatgtttctggaaatgctttcataattaactccttttatcgttagcgaatgatggataacagcggttcacctgcgcttatctgcgccgtgccgtggggtaatacgtccgtaaaatcatcgctattactgattaataccggcgtcgtcagatcaaatccggcctcgcgaatagcagggatatcaaaagaaatcagccgatcgcctgtattgaccttgtcacccacgttgacgtgagcggaaaagaatttgccgtccagttttacggtgtcgataccgacatgaatcaggatctccacaccatcatcactctcaatgccaatggcgtgtaatgtggcgaacaagctagcaattcgacccgcaaccggagaacgcacttcaccaacgctgggcagaatggcaatacctttacccaacaggccactggcaaacgtggtatcagcgacgtgaatgagcggcacaatctctcccgtcatcggactacagataccgccctgctcaggtggtgtaataacctctggtgttttctcttgcggggcaccctgcgctggctgacgtttagcggtgatgaaatgaagcatcaccgtaccgacaaatgcgcaaccgatggcaatgacaccgccaataacgctggcccagacggtgaaatcaattcccgtactcgggatggtttgcatgaaggtgaaaatacttggcaaaccaaaggagtagactttcgtttgcgcgtagccaataatggtggccccccaaagccccactgatacaggcgataacaaaggggtacttacgcggcaggttgacgccatataccgctggttcggtgataccaaacagactcgtcaacgccgcacttcccgccaccacttttttctgcgcatcgcgttcgcagaggaagacgccgagcgccgccccgacctgcgccataatggcgggcattaacagcgggatcatggtgtcgtagcccagcacggtgaagttattgatacacagcggcaccaggccccagtgcagtccgaacatgacgaagatttgccagaagccgcccattaccgcgcccgcaaatgcaggaaccgcctgataaagccagagataaccggcggcaatcagttcgcttatccaggtacttagcggccccaccagcagaaaggtgacgggtgtgataaccatcagacatagcaatggtgtgaagaaatttttgattgcgctcggtaaccacgcattaagtcggcgttccagaatgctgcacaaccaggcagaaaaaataatgggaataacgctactgctgtaattcaacaatgtgaccggaatacccaggaaatccagccccagcgcatccgctttttgcccgttctcgaaagcagtcagaattaatggatgcactaacgctccaccaatcaccatggcagtaaatggattaccgccgaagcgtttccccgcggtgtatcccaggattatcgggaagaaccaaaacaaggcatcactggcgctgaataaaattaaataagtaccactttgttcggtcgtccactgaaaagtgagcgccagagccagcatacctttcaagatcccggttgccgccatcaaaccgatcagaggcgtaaaaataccactaataacataaacaaagcggtttagcagattacctttatcatcattttccggtgcctgttgcgctttttcgtcaaggcctgccacactgttaaccgccaggaagacatcggccacatggttacctatgaccacctgaaactggccaccgctttccaccaccataataataccgggggtctttttcagtacctctgcttgcgctttgctttcatcctttaatttaaaacgtaatcgcgttgcgcaatgcatcagactcacaatgttatctgcgcccccgactcctgcgactatttttctggctaactccgtcataacttgccctctaccgctttgcggcaaaactccaaaaaaaaacctgaaaaaaacggcctgacgtgaatcaagcaatttttttcaggttttgcccgcttagtgcggtaacaatcctttactcagtaataatatttcagtgttctttgcgcacgcgctctatatttatggctaaaaacataatctctgcgggactaattttacgttgatactgcaaaccaataaaaatggcgatccgttccgcacattgccatgcttgcgggtaattttgttttactgcttgttgtaaactttcatcactatcgttaatactagcatgttcaagaatacgccaggataaaaacttcagatgtgtaaccagtcgctgataactcaagctttcttcctggtaattaaggctgaactgaaattttattaattgcagcatttcgcgcattaactgcgtgacacctgcaacatcctccatatttccgctcatttgggcactgaccagatgcatggcaataaagcccacttcatctttcggtaactgcacgcccaaccgtttatcaataatggttaacgcttcttcccctagctggaactctttcgggtaaagccgctggatatcccacagcaacgggttgggcagcaacacgttttgctgaaagcgtttaatcgcaaactggcaatggtcagttaggctgatataaatactgtcctgtaattttcccaagcgctcctgcgctaaagagataatacgatcacaggttgccatcacctcaagaggaatatgacttaagagttcgcttaatcgcccgttcagttcatgactgctcaaggcatactctttttctattccactactgttaattctttcgccagcgcgtttttgaaagccaattccgcgccccatgacgactttttcccgctgttgatcatcaataaccaccacaacattattgttgagaattttggtgatttgcatgttcatagcaaggaccttttttataaacaaaaaaacccgacttcaccagtattctctggttatgtcaggttttgcctgcgaatgcagtaacaatccagtcatttattaatggtttttataacgaacatccaggttcggaaattaatttaattgcgtgcagagaaaatagcaatgcgctattgataaaaatatgaccatgctcgcagttattaactttgtgtaattttaggaatttataaagttatatataacaaatcccaataattaagttattgggatttgtctggtgaattatttgtcgctatctttccccgccagcagtttatccagctcatcgccaccgacgtgacggaaatcctgccccttcacgtagtagaagataaactcacaaatattctggcagcggtcgccaatacgttcgatagaacgcgcgcagaacagcgcagtaagtacgctcggaatggtacggctatcttccatcatgtaggtcatcagttgacgaacaataccttcgtattcctgatcgacttttttatcttcacgataaatacgtaccgcttcgtcaatgtccatccgcgcgaacgcgtccagcacgtcgtgcagcatctggatggtatgacggcccaggctctccagacttaccagcaacggctgatgctgctgggagaatttctccagcgcagtacggcagattttgtccgccacgtcgccaatacgctccagctcggcaatggttttactgatcaccataaccagtcgcaggtcgctcgccgtcggctgacgtttggcgataatgcgcacgcaggcttcatcgatcgccacttccatcatgttgacgttcttgtcgccttcgatgacgcgcttcgccagatcgctgtcctggttatgcatcgcggtgattgcatcagaaagctgctgctccaccatgccgcccatggtcatcacctgcgtgcggatactttccagttcggcgttgaactggccggaaatatgtttattaagattgagactgtccataacgcactcctgaatcaaccgtaacgaccggtgatgtagtcttctgtttgtttcttcgctggcttggtgaacagatcgtccgtgttgctgaactcaatcaattcgcccaggtacataaacgccgtgtggtcggaacaacgcgcagcctgctgcatgttgtgggtgacgatcaccacggtgtaatcctgcttcagttcggtgatcagctcttcaatacgcccggtagagatagggtcgagcgcgctacacggttcgtcgagcagcagcacttccgggcgaatggcgataccacgcgcaatacacagacgctgttgctgaccaccagagagagagtaaccgctctggtgcaatttatctttggtttcgttccacaatgcggctttggtcaatgcccactgcacgcgctcgtccatgtcggcacgggagagcttctcaaacagacgaacgccaaaagcgatgttgtcgtagatggacatcggaaacggcgtcggtttctggaacaccatgcccactttcgcacgcagcagtgcgatatcctgagagttggtcaggatgttgtcgccatcaagcagaatttcaccttccgcacgctgctccgggtacagttcaaacattttgttgaaggtacgcagcagcgtgcttttaccgcagccggacggcccgataaacgccgttacctggtttttagcgatatccaggttgatgtttttcagggcatggaatttgccgtagtagaagttcaaattacgaacctgaattttactcggggcagtttcaaccatactcattgcaatcttttcctcatcgtgcctgatgcacttcgctaatcaggcttaccgtaggccggatcaggcgttcacgccgcatccggcaaagtgttaaccgtgtacagagtcaaaaaggcgctcggtcggtcccctcgcccctctggggagagggttagggtgaggggaaaaccgtgtcagcaatatcaaccgtgtttattcttcgcaaaaacaacgcgcgccagaatgttcagcagcagtacgcacagggtaatgatcaataccccggcccaggccaattgctgccattccgcaaacgggctcatcgcaaacttaaagatcgtcaccggcaggttggcgatcggctgcatcatgtccgtgctccagaactggttggagagcgcggtaaacagcagcggcgcggtttcaccagcaatacgggcaatcgccagcaggataccggtcataatcccggacacgctcgctttcagcgtaatcgcagagatcatcttccacttcggtgtacccagcgcataagccgcttcacgcaggctgtacggcaccagtttcagcatgttctcggtggtgcggataacaatcggcacctgcaacaacgccagggcaatcacgcccgcccagccggagaagtgctccatctgcgccaccacaatggtgtaaacaaacagaccaaccacaatgctcggcgcagagagcagaatgtcgttaatgaagcgaatcacttctgccagccaggatttacgaccatattccgccagataaatccccgccataatgcccagcggcgtaccgaataccgtggcccacaaaattaacagcccgctacccgccagagcgttcgccagaccaccaccttccgtattgggcggcggcgtcatttcagtgaacagcgccaggctcataccgtcgataccgcgagtgatggtggacattaaaatccagatcagccagaacaggccgaaggccatcgtcgccatgctgagcgtcagcgcaatacggtttttgaggcggcgacgcgcctgcattttgcggcgagattcagccagcgccgcagtggtttgcatttcaaccatagccattagcgtgccccctcattcttagccaggcgcataatcataaacttgcttgcggcgaggacgatgaaggtaatcacaaacaggatcaggcccagttccatcagtgcggcaacgtgcagaccggattccgcttccgcaaattcgttcgccagcgcagaggtgatactgttgcccggcatatacaggctggcgctgtcgagctggtaggtgttaccgatgataaaggtcaccgccatggtttcaccgagcgcgcggcccagccccagcatgatgccgccgataacaccatttttggtgaacggaagaacgatacgccagataacttcccaggtggtgcagccaataccgtaggcgctctctttcatcatcaccggggtttgttcgaacacatcacgcattaccgccgcaatgtacggaataatcatgatggcgaggatcacgcctgccgcgaggataccgataccaaatgcggggccagagaacagcgcgccaacaatcgggatattgctcatgatattgccgaccggctcctgaaagtaaacggcgaacagcggcgcaaagataaacaggccccacatgccgtaaacgatacttggaatggctgccagcagctcaatggcgatacccagcgggcgtttcagccagccaggcgcaagctcagtcaggaacagggcgataccgaaactcaccgggacggcgatcagcagcgcgataaagctagtcaccaacgtaccgtagatcggcaccagcgccccgtagatatcgttcggtgcatcccactctttggtccataggaaagccagaccaaatttctgaatgctcggccaggaggagatgatcagagagacaataatgccacccaacatcaatagcacaatcagcgccgccagttttaccagcacgctgaaaattatgtcgccctttttacccggtgggttaaaagcaggcttggttgcagccataagttactcttcagttaaacgcgtttacaaagtcattttgtaatgccggatgcggcgtaaaacaccgtacccggcctggagttttattagtacagcggcttaccgctactgtctttaatattggtcttccacgcagcgcgaacctgttcaactacactatccggcaggctggcgtaatccaggtcgttcgcctgtttagccccggttttgtacgcccagtcgaagaatttcagcacttctgtgccttgttctggtttcttctgatctttgtggatcagaatgaacgtggtagaggtaataggccatgcatcttcgcctttctggttggtcagatcctgagcgaaggttttgctccagtctgcaccttttgctgcattagcgaagttttcttcggtcggactaaccggtttaccatcagcggagatcagtttggtgtacgccaggttgttctgcttcgcgtaagcatattcaacataaccaattgcacccggcagacgctgaacgaacgcggcgataccgtcgttacctttaccgcccagaccgatcggccattttacggtagagccagtaccaacgttgtttttccactcttcgttcactttcgccaggtagctggtgaagacgaaggaagtcccggagccatctgcgcggcgtactacagcaatgttttgactaggcagtttcagacccggattcagtttggcgatggcttcatcatcccacttcttgattttgcccaggtagatgtcgccgagggttttaccatccagcaccagttcgccagacttcagccctggaatgttaaccgccagcaccacgccgccaatcacggtcgggaactggaacagaccttcctgagccagtttttcgtcagacagcggcgcgtcagaggcaccaaaatcaacggtattagcgataatctgttttacgccaccggaagaaccgataccctggtagttaactttattaccggtttctttctggtaagtgtcagcccatttggcatacaccggcgcagggaaggttgcacctgcacctgtcaggcttgcttctgcaaacacagagaaagcactcatgcttaaggtcgcggcgacaacagttgcgacggtggtacgcataactttcataatgtctcctgggaggattcataaagcattgtttgttggctacgagaagcaaaataggacaaacaggtgacagttatatgtaaggaatatgacagttttatgacagagagataaagtcttcagtctgatttaaataagcgttgatattcagtcaattacaaacattaataacgaagagatgacagaaaaattttcattctgtgacagagaaaaagtagccgaagatgacggtttgtcacatggagttggcaggatgtttgattaaaaacataacaggaagaaaaatgccccgcttacgcagggcatccatttattactcaaccgtaacgctttttgccaggttacgcggctggtcaacgtcggtgcctttgatcagcgcgacatggtaagccagcagctgcagcggaacggtgtagaagatcggtgcaatcacctcttccacatgcggcatctcgatgatgtgcatgttatcgctacttacaaaacccgcatcctgatcggcgaagacatacaactgaccgccacgcgcgcgaacttcttcaatgttggatttcagtttttccagcaattcgttgttcggtgcaacaacaataaccggcatatcggcatcaattagcgccagcggaccgtgtttcagttcgccagcagcgtaggcttcagcgtgaatgtaagagatctctttcaacttcaatgcgccttccagcgcgattgggtactgatcgccacggcccaggaacagcgcgtgatgtttgtcagagaaatcttctgccagcgcttcaatgcgtttgtcctgagacagcatctgctcaatacggctcggcagcgcctgcagaccatgcacgatgtcatgttcaatggaggcatccagacctttcaggcgagacagcttcgccaccagcatcaacagcacagttaactgagtggtgaatgctttagtggatgccacgccgatttctgtacccgcgttggtcattagcgccagatcggattcgcgcaccagagaagaacccggaacgttacagattgccagactaccaaggtaacccagctctttgctcagacgcaggccagccagggtatccgcggtttcgccagactgactcaaggtgatcatcaggctgttacgacgcacggcagatttgcgatagcggaattcagaggcgatttcgacgtcgcacggaatacctgctaggctttcaaaccagtagcgggaaaccataccggagttataagaagtaccacaggcgaggatctgaatatgctcaaccttgctcagcagttcgtcggcgttcggtcccagctcgcttaaatcaacctgaccgtggctgatgcgtccggtaagggtgtttttgatcgcgttcggctgttcgtagatctctttctgcatgtagtgacggtaaatgcctttatcgcccgcgtcatattgcagattggattcgatatcctgacgttttacttccgcgccagttttatcgaagatgtttacgctacggcgagtgatttccgcaatatcgccctcttcaaggaagataaagcgacgggtcaccggcaacagcgccagctggtcagaagcgataaagttttcgcccatccccaggccaatcaccagcggactaccagaacgtgccgccagcagggtatccgggtgacgggagtccatgatcactgtaccgtacgcaccacgcagctgcgggatagcacgcagaacggcctcacgcagagtcccgccttgtttcagctcccagttcaccagatgggcaatcacttcggtgtcggtttcagaaacgaaggtatagccacgcgcttttagctcttcacgcagcggttcatggttttcgatgatgccgttatgcaccaccacaatgtgttcagaaacatgcggatgcgcattcacttcactaggttcaccgtgggtcgcccagcgagtgtgagcaataccagtgccgccatgcagaggatgttcttccgctgcctgtgccagcatctggactttaccgaggcgacgcaggcgggtcatatgaccttctgcatcaacaacggccagaccggcagagtcatatccgcggtattccagacgacgtaaaccttcaagaaggatttctgctacatcacgttgcgcgatcgcgccaacaattccacacatagtttttgattccgatttatatcgttgtcggtcaacctgtatgcccgttttttcgggcgccccgagccttgtagagagtggggttatttttatagttactgcttgtgggagggagattatgttatctcctcatcccatgtgaccgggttagccggccagaatcactttttctttaccggacgacgccagccttctttctgagtctgcggcacacggctgatagctaatgcattttcgccgacattacgcgtcacagttgtacccgcagcaatggtcgcgcctttgcctactgttaccggggccaccagctgagtgtcggaaccaacaaacacatcgtcgccgataatggtcttaaatttattcgcaccatcgtagttgcaggtaatggttcccgcgccgatgttaacgttatcgccaatttccgcatcgcccaggtaagtcagatgaccagctttgctgcctttacccagacgcgcttttttcatctcaacgaagttaccgacgtgagcaccttccagcaactcagcaccaggacgcaaacgggcaaacgggccaatggtacaggccgctgccagattcgcatcttccacaacggtatacggactgatttcgcaatcatcgccaatcacgctgtttttaatcacgcaaccggtgccaattttcacgcgatgaccgagagtcacgttgccctcgatgataacgttagtatcaatttcaacatcgcgcccgtgagttagcgtaccacgcagatcaaaacgcgctggatcgcgcagcataacgcctgctaacagcagtttttcagcctgttcggactgataaacacgctccagacgggagagttgcaggcggttattcacgccttctacttcgcttaaacgttgcggatgaacggcgacgatttcacgcccttcctgatacgccagcgcaataatgtcggtgatgtagtattcgccctgagcattattgttggtcagcttcgccagccagcgtttcatatctgcgccgttggcaatcagaatgccggtgttgatctcctgaatctgacgctgctcgtcggtggcatctttgtgctcaacaatgccggtaactttgccgttttcacgggtgatacgtccataaccggtcggatcatccagtttcaccgtcagcagaccaatgccaccctgcggtttagcatcacgcagacgctggagtgtttcgacagagatcagcggcacgtcgccgtagagcattaaaatgtcttcatcatcggcaaagaaaggtgcggcctgctgcattgcatgacccgtacccagctgctctgcctgaagcacccagttaaggttgtcgtctttcagcgcctgttttagcagatcgccgccgtgaccgtacaccaggtgaacgtgcgctgcgcctaattcattcgcagcatcaatgacatgctgaaccatcgctttcccggcaagggtatgcagcactttcggaagatcggaatacatgcgcgtgcctttgcctgcggcaaggatcactacgctcatagcattattcaacatacgcgtcctgactgtaatttgagaacgaatttaaaccgcttcaccttgaaaaaactacatttttttcatcgtgaaatggacagaggataaattgttcaataacggattatccccgctgacgaaagcgccattttcgaccatcgtcacgccttttgtctgcagaaaattaaggcagtaccttaatttaagcgtcaggtggatgtttttgctcttatttcgatcaatgaataaacaggaaaacaggggggttttatatcagcaggatctatgtgaacgctattcaggacgggtcacacgcgcaaaaaaaagccagcctgtttccagactggcttttgtgcttttcaagccggtgttacatcgcttttttggtcaactcgataacgcgcagctgcgcgatcgctttggccagttccgcagacgcctgagcgtaatctacgtcgccgtgagagctgctaatgtgctcttcagccttacgtttcgcttccatggctcgcgcttcgtcgagatcctggccgcgaattgcggtgtcggccagaacggtcacgttgccaggctgcacttcaagaatgccgccagacagatagataaactcttcgtgaccgtgctgtttcacgatgcgaatcataccaggcttaatggcggtgagcagcggtgcgtggccagggtagatccccagttcaccttcgctacccgttacctggattttctcgaccagaccagagaacatttgttgctctgcgctgacgacgtccaggtggtaagtcattgccatatcaccctccgattaaggcgttaaagttttttggctttttccacagcttcttcgatggaaccgaccatgtagaacgcctgctccggcaggtgatcgtattcgccttccatgatgcctttaaagccacggatggtgtctttcagggagacgtatttacccggagaaccggtgaatacttctgccacgaagaacggctgggacaggaagcgctggatcttacgagcacgcgctaccaccagtttgtcttcttcagacagttcatccatacccaggatggcgatgatgtctttcagttcctgataacgttgcaggatggactgaacgccacgcgcggtgtcgtagtgttcctgaccaaccaccagcgggtccagctgacggctggtggagtccagcgggtcaacggccgggtagatacccagagacgcgatctgacggctcagtaccacggttgcgtcaaggtgcgcaaaggtggttgccggagacgggtcagtcaagtcatccgcaggtacgtatactgcctgtacggaggtgatagaaccagttttggtggaggtgatacgttcctgcagaacgcccatctcttccgccagggtcggctgataacctaccgcactaggcatacggcccagcagtgcggatacttccgtaccggccagggtgtaacgatagatgttgtcaacgaacagcagaacgtcacgaccttcgtcacggaatttctcagccatggtcagaccggtcagagcaacgcgcagacggtttcccggcggctcgttcatctggccatacaccagggatactttgtcgataacgttggagtcggtcatttcgtggtagaagtcgttaccctcacgagtacgttcacctacgcccgcaaacacagagtaaccggagtgctcgatcgcgatgttacgaatgagctccatcatgtttacggttttacctacacccgcaccaccgaacagaccaactttaccgcccttagcgaacggacacatcaggtcgataactttgataccggtttccagcagttcctgagagttactcagctcttcgtaggaaggtgctgcgcggtgaatcgcccaacgctcttcttcaccgatctcgcctttcatgtcgaccggttcacccagtacgttcatgatacggcccagagtcgctttacctaccgggacttcaatcgggtgttcgaggtcttttacatccagaccgcgacgcagaccgtcggaggaacccattgcgatggtacgtacgataccgccgccgagctgctgctgaacttccagcaccagacgctcattaccattttgcacctcaagagcatcgtacacgcgcggtacggcatcctgagggaattcgacgtcaactacggcgccgattacctggacaatctttccagtagccatcttaaatcctctacgaaataacctgtttaaaccgcggcggccccgctgacgatctcggtgagttcctgagtaatgctggcctgacgagctttgttgtataccaactgcagctctttaatcaggctgccgccattgtcggtcgcggctttcatcgccaccatacgggcggcctgctcgctggccaggttttcaaccacgccctgataaacctgagattcgacataacgacgcagcagggtatccagcaacgccttcggatcgggttcgtacaggtaatcccaggatttatgtttcagatcatcatcatcacttgccggtaacggcagcagctggctgatggtcggaacctgagacatggtgttaataaatttgttgctgacaatgtaaagcttgtccagacggccttcgtcgtaggcctgcaacatcacttttaccggaccgatcagttcggacagggaagggttatcccccatgccggtgacctgggcaacaacattgccgcccacggagttgaagaagctcacgcctttgctgccgatcattgcgaggtcgcattgaacgcctttgtcggtccaggtcttcatttccgccagcagttttttgaacaggttaatgttcaaaccaccgcacaaaccacggtcggtgctcaccaccaggtagcccacgcgtttaacgtcgcggtcttccaggtaagggtgcttatattccagattaccgtgtgcaaggtgaccaatcactttgcgcatggtttctgcataaggacggctggccgccatgcgatcctggcttttacgcattttggaagcggcgaccatctccatcgctttagtgatcttttgcgtgttctggacgcttgcgatcttactacgtatctcttttgcgccggccatgagcttctcctcaatgccttgcggcctgccctaaggcaagccgccagacgttaccaggattgggttgctttgaaggaatcgaggatgcctttcagcttgccttcgatttcgtcgttgtagccaccggtctggttgatctcttgcatcaacggagcgtgatcacggtcgacgtaagccagcagagcggcttcgaagctgccaattttgctcagttcaacatccgccaggtaaccacgttctgctgcgaacagaaccagagactgctgcgcaacggacatcggcgcatactgtttctgtttcagcagttcggtcactttctgaccgtggtcaagctgcttacgtgttgcatcgtcaaggtcggatgcaaactgagagaacgctgccagttcacgatactgtgccagagcggtacggataccaccggacagttttttcatgatcttggtctgtgctgcaccaccaacacgggatacggaaatacccgggttaaccgcaggacgaataccggcgttgaacaggttggtttccaggaagatctgaccatcggtaatggagattacgttggtcggaacgaacgcagaaacgtcacccgcctgagtttcgataatcggcagtgcggtcagagaaccggttttccctttcacttcacctttggtgaaggcttcaacgtattcggcgttaacacgtgcagcacgctccagcagacgagagtggaggtagaaaacgtcgcccgggaatgcttcacgtcctggcggacgacggagcagcagggagatctgacggtaagcaacagcctgtttagacaggtcatcgtaaatgatcagcgcatcttcaccgcggtcacggaagtattcgcccattgcgcaaccggcatacggtgccaggtattgcagtgcagcggattcagacgcggttgctaccacaacgatggtgttagccagtgcgccgtgctcttccagtttacgtaccacgttagaaatggtggacgctttctggccgatagcgacatagatacatttgataccggaatcgcgctggttgatgatggcatcgatagccagtgcggttttacctgtctgacggtcaccgatgatcaattcacgctgaccacgaccgattgggatcatggagtcaacggctttataaccggtctgtaccggctgatctacggactgacgttcgataacgcccggagcgattgcttctacagcagagaagccgtcgtgatccagcggacctttaccgtcgattggtgcacccagagtgttaaccacacggcccagcaggccacggccaaccggaacttccaggatacggccagtacacttaactttcatgccttcggcaaggtcagcgtacggacccataacaaccgcacctacagagtcgcgctcgaggttcagtgcgatagcgtaacggttacccggcagggagatcatttcaccctgcatacaatcggccaggccgtgaatgcggataacaccgtcacttacagaaacaatagtaccttcgttgtgagcttcactcacaacattgaactgagcaatgcgctgcttgatcagttcgctgatttcggtggaattcagttgcatgctccagtccccttaagactgcaagacgtctgcaaggcgctcaagacgaccgcgtacgctgccatcaatgaccatatcacccgctcggatgataacgcctgccattacagacttatcgattttgcaattcagcttaactttgcgactcagacgtttttccatcgcagcagaaattttcgcgagctgttgttcactcagtgcggcagcggaaatgacgtctacctcagcggtagcctcactcacggcacgcaggtgaataaactgctccagaacatccgggagcgcgttaagacgaccattttcagccataacccgaatcaggttctgaccgttttcgtccagttgctcaccacaaactgcgataaagctctcggcgagcgtttctggcgcaagcgcgccagagagaagctctgccatttgttcgtttttggttacctcggcggcaaacgccagcatgtcctgccagcgttctacactttggtgttcgacggcaaagtcaaaagctgctttggcgtaggggcgagctaccgtaataaattcagacatcagcccctccctccttacagttcagcgacaagtttatccacgatgtcgctgttagcagcttcatccacggaacgttcgatgatcttctcggcgccagcaacagccaggatagcaacttgcttacgcagctcttcacgggcacgtttacgctcggcttcaatttccgcctgcgcctgggccacgattttagtacgttcctgttctgcctcagctttcgcttcgtccagaatctggctgcggcgtttgttcgcctgctcgatgattacctgggcttccgctttcgcttttttcagctggtcggtcgcgctggcctttgcaaggtcaaggtccttatgtgctcgttctgcggaagcaaggccgtcagcaatttctttttgacgtttttcgatggctgccattaatggcggccatacgtacttcatgcagaacagaacgaacaggacaaacgcgatggcctggccgaggattgttgcgttaagattcacagcacaatgcctctatttagttaacgttctgatattgctctttaaataaaagcaacgcttattacgcgacagcgaacatcacgtacagacccagacctacagcgatcatcgggatagcatccaccagacccataacgataaagaactgagtacgcagcagaggaatcagatcaggttgacgcgctgcgccttccaggaatttacccccgaggatgccgataccgatcgcagcaccgattgccgccagacccatcatcacagcggcagccatgtacagcagatccatattcaggttttccatgacagtctccagtttgtttcagttaaaacgtagtagtgttggtaaattaatgttcttcagacgccatgctcagatagacgatcgtcagaaccatgaagatgaaggcttgcagcgtaatgatcaggatgtggaaaatggcccacggcacattcaggatccactgactccaccacggcaacagaccagcaatcagaatgaaaatcagctcaccggcatacatgttaccgaacagtcgcaaaccgagactaactggtttggacagcaggcttaccccttcaaggattaagttgacaggaatgaacgcccagtgattgaacggctgcagcgtcaactctttcgtgaagccgccgatgcctttcattttgatgctgtagaacagaatcaggataaatacgcccagtgccatagacagcgttacgttcacgtccgcagacggaaccacacgcagtgcaggcagacccagtacatgttcagcaatgtacggcagcaggtcgataggcagtaaatccatcaggttcatcaggaatacccagacgaagatcgtcagggccagcggagcaatcagcttgcttttgccatggtacatgtctttcacgctaccattaacaaagccgatcaccagctcaatcgcggtctgaaacttacctggcacaccgctggtcgcctttttggctacgctacggaataaaaccaggaacaacagacccagcaccacgctgaagaacatggagtcaatattgattgtccagaaggtggctggggggttttgtggatccaccaggctgaatgtacgcaggtccagctgaaggttattcaggtggtgtcctatgtaatcctgcggcgtcatattttcactagccatgatgccttttaccctttgttgttaattacagccggtgccagtatctgaaccaccagcaccaaaacccacgtaacgatcagcggcaagaataccgcctttaaaaccgccaacgccaccaccagtaacaccaacatcgccagaactttgaaagcttcgccaaatgcgaatgtccaggccacccggcctttcgctggtgtatgcgcctggtgacgccaggcaaatatcataaacaaaacgttaggcagaaagactgccaggcccccgcttattgcagagacgccccagaaggggtctttgaggctgaacagcaatccacttgctatcaccaccagtaactgaacgagcagaagcttccgagcaacgtttcgactcacgaggctcacagacatcacgtttttcactcctgctcccttcgaggtatgccgcgtgtcgtataaaactttctttaaggcttagagtcaagcatcaaaaagcggtcaaattatacggtgcgcccccgtgatttcaaacaataagtagccaaaaggtgaataaatgtttaaatatttttccagtgcatacaattgcgacttttctgctaaccctgttcgatcatgaaaaactgtaaataacgcgtaaacactggtgataaagcgtgcttcagatcacatattgcgcatgttcgcgcacagcatatttatttacttggcaaatgatgcctttgcaagtttatgatatttcagtctaaaaacagatactgttttaataaatgacatttacacaacaaaaaccacccattgacatttttaataatgttttaacagccaatgatggttcttagcgccgatttttagcagactgatattttcactaatgacttattttctgcttaccaaaaaaagccacgttatcttgttgatgcaaaagagtgaacgtggcgttaaatgtaaccagttatatcagtagaaaacctggttgttgttaacagtctaaccggtcaattttttatgatttttttgataaaaattaaattttatttgctttaatcaccaccagatgacgttcgccatccagggctggaacctgaagtttaaccacactttcgacctgatattcttcgggcaacaaagcgatttcatcttccggcatttgccctttcagcgcgtagaaacggccttgctcaccaggaagatggtggcaccagctcaccatatcgttcagagaggcaaaagcgcggctaattacgccatcaaatggcggctcactaggaaactcttctaccctgctctgtactggttcaatattctccagtttaagctcatgttgcacctgacgaaggaaacgcacgcgtttaccaaggctatccaacagagtgaaatgggcttcaggacgcacgatagagagtggaatgcctggcagtcctggtccggtgccgacatcgataaaccgttcaccttgcagatacggtgccaccacaatgctatcgagaatatggcgtaccagcatctcattaggatcgcggacgctagtcaggttgtacgctttgttccatttatgcagcatattcacgtaggcaataagctggtttttctggtgatcggtaaggctaatacctgcgtctttcagcagtaaggagagtttgttgagcacggtgattacctgttcttgatgcgttgcctggtaagcgggtgcttaccaggcatttttaatgcgttatgcgctacgacgcagcataccctgttttttcagccacaccagcagaatggagatggccgcaggcgtgacgccagaaatacggctagcttggccgatagaggctggtttgtgatcgttaagtttggcgatcacttcgttagaaagaccggatacctggcggtaatccagtgtcgcgggtagcagggtgttctcgttacgcagctgcttttcgatctcatcttgctggcgcgcgatataaccttcgtatttaacctgaatctcaacctgttccgccgcctgttcgtctgtcaacgcaggggcaaacggcgtcagcgtggttaatttttcataagtcatttccggacgacgcagcagatcttcaccactggcttcacgggaaagcggcgcagtcaggtgagcattcacttcggctgcagcttccgcgctcggggttacccaggtgcttttcagacgctgacgctcacgctcgatattctcaagtttctcgttaaagcgcgcccaacgttcgtcatccaccaggcccagttcacgaccgatttcagtcaaacgcagatccgcattatcttcgcgtagcatcagacgatattctgcgcggctagtaaacatacgatacggttctttggttcctaaagtgcacaggtcatcaactagtacgccgagatacgcctgagaacgtgccggagcccaaccttctttgtcagcagacagacgggcagcgttaagaccggccagcaaaccttgcgcagcggcttcttcgtaaccggtagtgccgttaatctgaccagcaaagaacagcccctggataaacttgctctccagcgtcggtttcaggtcgcgaggatcgaagaagtcatactcaatggcataacccggacgcacgatcttcgcgttttccatcccctgcatagagcggacgatttgcatctgcacatcgaacggcaggctggtggagataccgttcggataaatttcattagaggtcagtccttccggttcaaggaagatctgatgctgatttctgtcggcgaagcgcatgactttgtcttcgatgctcgggcagtagcgtgggccgacaccttcgatcacccctgcgtacattgggctacgatcgaggttactgcggatcacatcatgggttttctcgttggtatgagtgatataacacggcacctgctggggatgctgggacgcattgcccataaagctgaataccggcattgggttatcgccatgctgttgcgccagtacgctaaagtcgatggttcgagcatcaatacgcggtggtgtcccggttttcagacgaccaacgcgcagcggcagttcacgcaaacggcgagaaagcggaatggacggcggatcaccagcacggccaccgctgtaattatccagaccgatatgaattttaccgtcgaggaacgtcccaacggtgagcacgacggctttggcacggaacttcagtcccatttgggtaacagcaccgaccacgcgatcgttttcgacaataagatcttcaaccgcctgctggaagatcatcaggttcggttggttctccagcgccgtacgtaccgcctgacggtagagcacacgatccgcctgagctcgggtagcgcgaaccgccggtcctttgcttgcgtttagtatcctaaactggatacccgcctgatcgatcgctttcgccatcagaccgccgagtgcatccacttcttttaccagatgtcccttcccaataccgccgatcgccgggttgcagctcatctgccccagagtgtcgatattgtgtgtcaaaagcagagtctgttgacccatacgcgccgcggccatcgcggcctcggtgcctgcatgacccccgccaatgatgatgacgtcaaaaggatccggataaaacatggtgattgcctcgcataacgcggtatgaaaatggattgaagcccgggccgtggattctactcaactttgtcggcttgagaaagacctgggatcctgggtattaaaaagaagatctatttatttagagatctgttctattgtgatctcttattaggatcgcactgccctgtggataacaaggatccggcttttaagatcaacaacctggaaaggatcattaactgtgaatgatcggtgatcctggaccgtataagctgggatcagaatgaggggttatacacaactcaaaaactgaacaacagttgttctttggataactaccggttgatccaagcttcctgacagagttatccacagtagatcgcacgatctgtatacttatttgagtaaattaacccagcttcccagccattcttctgccggatcttccggaatgtcgtgatcaagaatgttgatcttcagtgtttcgcctgtctgttttgcaccggaatttttgagttctgcctcgagtttatcgatagccccacaaaaggtgtcatattcacgactgccaataccgattgcgccaaagcggactgcagaaagatcgggcttctgttcctgcaatgcttcatagaaaggagaaaggttgtccggaatatctccggcaccgtgggtggagctgataaccagccagatcccactggcaggtaaatcttctaacagcggaccgtgcagcgtttcggtggtaaaacccgcctcttccagcttttcagccaggtgttctgctacatattcggcaccgccgagggtgctgccgctgataagagtgatatctgccataaaccgccacctttattaagagtggcgtattgtacgctgtgaacgcgttgggatctacctgtggaaaagtatgggattaaaaaagccgatcagggcttgatggtacgcatgatcgggttttgcaggacgatcaatgtctcggtggactgaatttcatcaattgtttggatcttgttgataagtacatgctggagagcgtcgatgctacggcacatcacttttataaagatgctgtagtggccggttgtgtaataggcttcagtgacttcatcaaggctttccagctttgccagcgcggaagggtagtctttggcgctctttaatataatgccgataaagcagcctacgtcataaccgagctgcttcgggctgacatcaatacgcgccccggtaatgatccccgcctgcttcattttctctactcgaacgtgaatcgtccccggactgacgccaaattgtttcgccagttcggcgtaagcggtgcgcgcattgcccattaatgcttccaggatgccacggtccagattgtcgatcagataattttccataggattttcttatgcggattgatgattcattctattttagccttcttttttaatgaatcaaaagtgagttaggctttttattgaatgattattgcatgtgtgtcggtttttgttgcttaatcataagcaacaggacgcaggagtataaaaaatgaaaaccgcttacattgccaaacaacgtcaaattagcttcgtgaaatctcacttttctcgtcaactggaagaacgtctggggctgatcgaagtccaggcgccgattcttagccgtgtgggggatggcacgcaggataacttgagcggctgtgaaaaagcggtgcaggtaaaagtgaaagctctgcctgatgcccagttcgaagtggttcatagtctggcgaagtggaaacgtcagaccttagggcaacacgacttcagcgcgggcgaagggctgtacacgcacatgaaagcccttcgccccgatgaagaccgtctttctccgttgcacagcgtctatgttgaccagtgggactgggaacgcgtaatgggcgacggtgagcgtcaattcagcactctgaaaagcacggtagaggcgatctgggcgggaattaaagcaaccgaagctgcggttagcgaagagtttggcctggcaccgttcctgccggatcagatccacttcgtacacagccaggagttactgtctcgttatccggatcttgatgccaaagggcgtgagcgggcgatagcgaaagatcttggcgcggtattccttgtcgggattggcggcaagctgagcgatggtcatcgccacgacgtgcgcgcaccggattatgatgactggagcaccccgagtgagctgggccatgcgggtctgaacggcgatattctggtgtggaacccggtactggaagatgcgtttgagctttcctccatggggatccgtgtagatgccgacacgctgaagcatcaactggcgctgaccggtgacgaagatcgcctggagctggagtggcatcaggcgctgctgcgcggtgaaatgccgcagaccatcggcggcggtatcggccagtctcgtttgactatgctgctgctgcaactgccgcatatcggccaggttcagtgtggagtatggccagctgctgttcgcgagagcgtcccttctctgctgtaataatttatcgccgccagcgtctgagcaggcggcttcgcatcccggtatcaaagcgccagatatgatcgaaaatgcgcatgatgccgggtttgccgtgtgcgctcatcgccacggcatgaaagcgatgctgatgtacccgctgcagctctttcactttactcgtcacgtcgtcaggcaaccgctgagcgataaaatcagaaatcaccaccgcatcggcatcaaaccattccctgctttgcaagcgttccataatggcgcgaaaacaactggcaagatcggtgccgccacgaaactgctggcttaaaaaacggattgcttgttcgatgccttgtgggccactaagctcataacggacgatctcggtggaaaatagcataatatagcagcgccggttttctgcgagagcaatgcgcatcaaggccaggcagaacgctttcgcacactgttcattaaagccgcccatactgccggaagtatccacacagacaataaacggcccgcgcggctgttcatcgtaatctttatgtaccaccggacgttcgatcactttttcacgccagctctcaccgtgcaggcgataggtgagcaactgtttttccaccagccgacggtaaaactcatactccagttccgttatccctagtgtcgccagttctggcggcaggagacgtaaaatatcatcgctttgttgcagaccatcaacctgctcaggaaccgtcgccggttcgcgcaccatggtgcggaaggtttccatctgcgcatcgttgcgcggtatacttttggcttcccgagaacgccccagctgctctgccaggcgtttcagttccggctgttcgttaagaaattcaccgtatttcacaatcaactgatagtcgccacgtttaagctgaccggcgctcatatcccacagacgaccagctgcagtattgttatctgcgagaatcggttcaagttgtccgctcagcgtcatgcgttcctgaacttcactcaacagttgttcgcgttcttcttctaatagctgttgatttaacgtcgttgcttgcacgatcagacttaaacgccaacgctggagaaaaagcgtgtgtaacgcactagtgatcgtgctgttagcatcaaccaactgtcgggcttgttctgcccatggagaattcagacgatgcagtaagtccaggatctgtggtagctgcacaataaactgtggcgtggagaggagctggctttgctgatagcacatcacctcttcggtgagttccggcgggactcgggcatctttcagccgactgcgcagcgcttcacgccagcggggaacatcatcagtgattgccgccttcaggcgtgggaatttttcaaagaagaccgccagctgcggactggccagcagtgcgatgatcatctcttcgatcaatccctcttcgctgacggccagcatcacattaagcgtatccagcgttagcattgttgtgcctggcgaatctgtgcaccgacatcctgtaggctggcttcaatgcgacctaaccagtcgccagggataaacagacatttttgctgttcgctgaataaagcgtgttgcttgcgccagtcgctttcaagctcttccagttgttgttttatttcaccaggcagaccttcagcgctactaccgggaagtgccagcgtactgccttgtaaacttacatcgcgaacgacaagatgttgggcgctatcaacttccagattcagtttctgggcaaagccgataccgttcagtttaccgcgaatttcaccacctttgctcagccactgttccagcgcgctacgctcaaaggagatatgaaccacttccatatcatgcagttttaacggtttttgcagcagtagagtcagagtggaagcagtaacgttaacaggaagttgatactgctgacgacggctgaaaatgccgcccagacgaattaccgttaaggctgttttatcgctttgttgctgctggagttgcaggtgacgttgcacaatcgcgccaaggcgagtcaacatcccttgctgttgccaggcgtgaccggtcatcaatacatcaatttgttgttgtatcaaattcaggctttgcgcgtcataccacaggcaatctttcagcaaaatgagatctaccggggcaacagcactgcgaccgctaaaaaaggcgctggcctgcaataatcggatcgcttttttccagcgacgatcgctgacataaggcgcatccggtaatttatccagttgctggcgcagcataaaaatcagctcaaatacatgatcgggcagcgtaatttcaccaatctctttctgccagcgttcatattcttcatctgtgacctgcaaggcatcaggaaccggattgtcgttttcatcctgttgactggtcagcatggagcggaaattcgctttatcctgcactttatctaaccacagacgaatcagcatgcggtcatataacgcttccagactgctgtctgcttccggcagctcgttggaggccgccaccagcagacgcatcgggattttttctacgtgtgcaccgttgcggaactggcgctcgttaatggcggtgagcaaggtattaagaattgccgggcccgctttccagatctcatccagaaagacaatttctgcttccggcaggtaaccgctggttaaacgttcatagcgcccttcatcttttagcgcctgaatagaaaggggaccaaaaacttcttccggcgtggagaagcgggtcatcagatattcaaacgcgcgggcattctgaaaggcgaattttaagcgccgggcgatcaaacttttggcaatacctggcgggccaaggaggaacacactttcaccacttaatgccgctaataaacacaagcggatggcgtggctacgttcataaagccccttttccaagctactgctcaggcgggaaattctttccgctaataaatgagggtgagccataatgaagtggcgtcctttcgtcaaaagttctgcgtaaattgcgagtatagacgtttcttgctggtggctaaaatagtctcaaagggggggtatttttctttgagccaggttaatgtggccgcatttaggagtacgattttgccgttaatcgtgcatactgtgcgcttttttgtgggccaagggactaagcacacatttcatatttcaacgaaagactagtctatgagcactgataataagcaaagtttgcccgcgattaccctcgcggcgattggagttgtctacggcgatattggtaccagcccgttatatacacttcgtgaatgtttgtccggccagtttggttttggcgttgaacgcgatgccgtgtttggctttttaagcctgatcttctggctgctaatctttgtggtttccattaaatatctcaccttcgtgatgcgggcagataacgccggtgagggggggatcctgacgttgatgagccttgccgggcgtaatacgagcgcgcgaaccacaagtatgctggtgattatggggctaatcggcggcagctttttttatggtgaagtcgtcataacacccgctattagcgtgatgagtgccattgaaggtctggaaatcgtcgccccgcagctggatacctggatagttcccctcagtattatcgttctcactttattatttatgattcaaaaacatggcacggctatggtcggtaagctgtttgcgccgatcatgctgacctggtttttgattctggcaggactggggttacgtagcattattgctaacccggaagtgctgcatgcgctgaatccaatgtgggcggtgcatttcttccttgaatacaaaacggtttcttttattgcattaggggcagtggtgttgagcattacgggggtcgaggcgctgtatgctgatatggggcactttggtaagttccctattcgcctggcgtggttcaccgtcgtattaccttccttgacccttaattacttcggtcagggagcgctgttgttaaagaacccggaagcgattaagaacccgttcttcctgttggcaccggactgggcgctgatcccgctgctgatcatcgccgcactggcgacggtaattgccagccaggcggttatctctggcgtcttcagtttgacgcgtcaggcggtacgtctgggatatttgagcccgatgcgcattattcacacctccgaaatggagagtgggcaaatctatattccgtttgtgaactggatgctctatgtcgcggtcgtgattgtgattgtcagctttgagcactccagcaacctggcggcggcgtacgggattgcggtgaccggaaccatggtgctgacgtctattctcagcactaccgtggcacgtcagaactggcactggaataagtattttgttgcgctgatcctgattgctttcctttgtgtcgatattccattgttcaccgctaacctcgataaactgctctccggcggctggttgccattgagcctcggtactgtgatgtttatcgtgatgaccacctggaagagcgagcgtttccgcttgctgcggcggatgcatgaacatggtaactctctggaagcgatgattgctagcctggagaaaagtccgcctgttcgcgtgcccgggaccgcggtgtatatgagccgtgcaatcaacgtcattccctttgcgctgatgcataaccttaaacataacaaggtattgcatgagcgggtgattctgttaactctgcgcaccgaagacgctccatatgtccataacgtccgtcgggtacagattgaacaactgagccccactttctggcgcgtggtggcaagttatggttggcgagaaacgccaaacgtagaagaagttttccaccgctgcggtctggaaggattaagttgccggatgatggaaacctccttctttatgagccatgagagcttgatcctcggcaaacgcccgtggtatttgcgtctgcgcggcaagctgtacttgctgctgcaacgtaatgcgctgcgtgcaccagatcaatttgaaatcccgccaaacagggttatcgaactgggtactcaggtcgaaatctaacgccagacgcctcctttcttcataagggggcgtttttgttttcatggttaatcaccatgtaaaacgtttcgaggttgatcacatttccgtaacgtcacgatggttttcccaactcagtcaggattaaactgtgggtcagcgaaacgtttcgctgatggagaaaaaaatgaaaaaaggcaccgttcttaattctgatattagtagcgtgatctcccgtctgggacataccgatacgctggtggtgtgtgatgctggtttacccatccccaaaagtacaacgcgtatcgatatggcattaacccagggtgtaccttcttttatgcaggtgctgggcgtcgtcacaaatgaaatgcaggtcgaggcggccattatcgcggaagagatcaaacaccataatccgcaactccacgaaacgttgctcactcaccttgagcagctgcaaaaacaccagggaaataccattgaaattcgttacaccacgcatgaacaattcaaacaacaaaccgcagaaagtcaggcggtaattcgcagcggagaatgttctccgtatgcgaatatcattctctgtgctggcgtgacgttctgaggccgtcatggaagcattacttcagcttaaaggcatcgataaagccttcccgggcgtaaaagccctcagcggcgcagcgttaaatgtctatccgggccgcgtgatggcgctggtgggcgaaaacggcgcgggtaaatccaccatgatgaaagtgcttactggcatctatactcgcgatgccggtacgcttttatggctggggaaagaaacgacatttaccgggccaaaatcttcccaggaagccgggattgggattatccatcaggaactgaacctgatcccgcagttgaccattgccgaaaacattttcctcggtcgtgagtttgttaatcgctttggcaaaattgactggaaaaccatgtatgccgaagcggataaattgctggctaaacttaacctgcgctttaaaagcgacaagctggtgggcgatctttccatcggtgaccagcaaatggttgaaatcgccaaagtgctgagctttgagagcaaagtcatcattatggatgaaccgaccgatgcgctgaccgataccgaaaccgaatccctgttccgcgtcatccgcgagctgaaaagccaaggccgcggtattgtctatatctcccaccgcatgaaagaaatcttcgagatttgcgatgacgttaccgtttttcgtgatgggcaatttattgctgagcgcgaagtggcaagtctgaccgaagatagcctgattgagatgatggtgggtcgcaagctggaagatcaatatccgcacctggacaaagcgccgggagatatccgcctgaaagtcgataatctctgcggacctggcgttaacgatgtctcttttactttacgcaaaggcgaaattcttggcgtctctggtttgatgggcgcaggtcgtaccgaactgatgaaagtgctctacggcgcactaccgcgcaccagcggttacgtcaccctggatgggcatgaagtcgttacccgtagtccgcaggatggcctggcaaacggcattgtgtatatctccgaagaccgtaaacgtgacggtttagtgttgggcatgagtgtaaaagagaacatgagcctgacagcgctgcgctacttcagccgcgctggcggcagtttgaagcatgccgatgaacagcaggctgtgagtgatttcattcgtctgtttaatgtgaaaactccgagcatggaacaggcaattggtctgctttccggtggcaatcagcaaaaagtggcgattgcccgcggtctgatgacacgccccaaagtgttgatccttgatgaacctacccgtggcgtagatgtcggcgcgaaaaaagagatctatcaactgattaaccagttcaaagccgatggcttgagcatcattctggtgagtagcgagatgccagaagtattaggcatgagcgatcgcatcatcgtcatgcatgaagggcatctcagcggggaatttactcgtgagcaggccacccaggaagtgttaatggctgccgctgtgggcaagcttaatcgcgtgaatcaggagtaaaaaaatgacaacccagactgtctctggtcgccgttatttcacgaaagcgtggctgatggagcagaaaagccttatcgctctgctggtgctgatcgcgattgtcagcacgttaagcccgaactttttcaccatcaataacttattcaatattctccagcaaaccagtgtgaacgccattatggcggtcgggatgacgctggtgatcctgacgagcggcatcgacttaagcgtaggttctctgttggcgctgaccggcgcagttgctgcatctatcgtcggcattgaagtcaatgcgctggtggctgtcgctgctgctctcgcgttaggtgccgcaattggtgcggtaaccggggtgattgtagcgaaaggtcgcgtccaggcgtttatcgctacgctggttatgatgcttttactgcgcggcgtgaccatggtttataccaacggtagcccagtgaataccggctttactgagaacgccgatctgtttggctggtttggtattggtcgtccgctgggcgtaccgacgccagtctggatcatggggattgtcttcctcgcggcctggtacatgctgcatcacacgcgtctggggcgttacatctacgcgctgggcggcaacgaagcggcaacgcgtctttctggtatcaacgtcaataaaatcaaaatcatcgtctattctctttgtggtctgctggcaagcctggccgggatcattgaagtggcgcgtctctcctccgcacaacccacggcggggactggctatgagctggatgctattgctgcggtggttctgggcggtacgagtctggcgggcggaaaaggtcgcattgttgggacgttgatcggcgcattaattcttggcttccttaataatggattgaatttgttaggtgtttcctcctattaccagatgatcgtcaaagcggtggtgattttgctggcggtgctggtagacaacaaaaagcagtaataacgactacaggacatcttgaatatgaacatgaaaaaactggctaccctggtttccgctgttgcgctaagcgccaccgtcagtgcgaatgcgatggcaaaagacaccatcgcgctggtggtctccacgcttaacaacccgttctttgtaagcctgaaagatggcgcgcagaaagaggcggataaacttggctataacctggtggtgctggactcccagaacaacccggcgaaagagctggcgaacgtgcaggacttaaccgttcgcggcacaaaaattctgctgattaacccgaccgactccgacgcagtgggtaatgctgtgaagatggctaaccaggcgaacatcccggttatcactcttgaccgccaggcaacgaaaggtgaagtggtgagccacattgcttctgataacgtactgggcggcaaaatcgctggtgattacatcgcgaagaaagcgggtgaaggtgccaaagttatcgagctgcaaggcattgctggtacatccgcagcccgtgaacgtggcgaaggcttccagcaggccgttgctgctcacaagtttaatgttcttgccagccagccagcagattttgatcgcattaaaggtttgaacgtaatgcagaacctgttgaccgctcatccggatgttcaggctgtattcgcgcagaatgatgaaatggcgctgggcgcgctgcgcgcactgcaaactgccggtaaaagcgatgtgatggtcgtcggatttgacggtacaccggatggcgaaaaagcggtgaatgatggcaaactagcagcgactatcgctcagctacccgatcagattggcgcgaaaggcgtcgaaaccgcagataaagtgctgaaaggcgagaaagttcaggctaagtatccggttgatctgaaactggttgttaagcagtaattttaatcaggttgtatgacctgatggtgacataaatacgtcatcgacagatgaacgtgtaatataaagaaaagcagggcacgcgccaccctaacacggtggcgcattttatggacatcccgaatatgcaaaacgcaggcagcctcgttgttcttggcagcattaatgctgaccacattcttaatcttcaatcttttcctactccaggcgaaaccgtaaccggtaaccactatcaggttgcatttggcggcaaaggcgcgaatcaggctgtggctgctgggcgtagcggtgcgaatatcgcgtttattgcctgtacgggtgatgacagcattggtgagagcgttcgccagcagctcgccactgataacattgatattactccggtcagcgtgatcaaaggcgaaagtacaggtgtggcgctgatttttgttaatggcgaaggtgagaatgtcatcggtattcatgccggcgctaatgctgccctttccccggcgctggtggaagcgcaacgtgagcgtattgccaacgcgagtgcattattaatgcagctggaaagtccactcgaaagtgtgatggcagcggcgaaaatcgcccatcaaaataagactatcgttgcgcttaacccggctccggctcgcgaacttcctgacgaactgctggcgctggtggacattattacgccaaacgaaacggaagcagaaaagctcaccggtattcgtgttgaaaatgatgaagatgcagcgaaggcggcgcaggtactgcatgaaaaaggtatccgtactgtactgattactttaggaagtcgtggtgtatgggctagcgtgaatggtgaaggtcagcgcgttcctggattccgggtgcaggctgtcgataccattgctgccggagatacctttaacggtgcgttaatcacggcattgctggaagaaaaaccattgccagaggcgattcgttttgcccatgctgccgctgcgattgccgtaacacgtaaaggcgcacaaccttccgtaccgtggcgtgaagagatcgacgcatttttagacaggcagaggtgacgcttggctacaatgaaagatgttgcccgcctggcgggcgtttctaccagtacagtttctcacgttatcaataaagatcgcttcgtcagtgaagcgattaccgccaaagttgaagcggcgattaaagaactcaattacgcgccaagtgctctggcgcgtagcctcaaactcaatcaaacacataccattggcatgttgatcactgccagtaccaatcctttctatagtgaactggtgcgtggcgttgaacgcagctgcttcgaacgcggttatagtctcgtcctttgcaataccgaaggcgatgaacagcggatgaatcgcaatctggaaacgctgatgcaaaaacgcgttgatggcttgctgttactgtgcaccgaaacgcatcaacctagccgtgaaatcatgcaacgttatccgacagtgcctactgtgatgatggactgggctccgttcgatggcgacagcgatcttattcaggataacagcttgctgggcggagacttagcaacgcaatatctgatcgataaaggtcatacccgtatcgcctgtattaccggcccgctggataaaactccggcgcgcctgcggttggaaggttatcgggcggcgatgaaacgtgcgggtctcaacattcctgatggctatgaagtcactggtgattttgaatttaacggcgggtttgacgctatgcgccaactgctaagtcatccgctgcgtcctcaggccgtctttaccggaaatgacgctatggctgttggcgtttaccaggcgttatatcaggcagagttacaggttccgcaggatatcgcggtgattggctatgacgatatcgaactggcaagctttatgacgccaccattaaccactatccaccaaccgaaagatgaactgggggagctggcgattgatgtactcatccatcggataacccagccgacccttcagcaacaacgattacaacttactccgattctgatggaacgcggtagcgcttaattactcgctttcacttggaacgcggttcggcttagatttacgctgtcttttgatcaaattattaccatcggttgttttcagaagcatgaacattgctgcactagcaacagtaataatgcccattgtgataaacgtatagtggaattgttcgacagtcgttgtgccttccattccttcataaacgcgaaggacggccgcacttacagcaacgcctaaactaatgctcagttgctgcgtgaccgccagaacactgttaccgctgctggcattgtcatcggtcagatcggcaagtgtgatggtattcatcgcggtaaactgcgtgctcatagccatccctaatataaacaacggcaagatcagcatccatatagccattgctggactttgcaaagagaactgagcgatcattagcccaataatcaccgtgatccccactaacgtatggcgatagcccagacgacgtaagacttgggtaaccatgctttttgcaataatggaacctaacgctgtcggtgccatcatacagccagcaataaacgcctgataaccaaatcctacctgtaacatcaatggcataaggaacggtacacagccggtccccagacgggttgcaatattgcctacgataccgatgctgaaagtgcgggttttaaataaatctaaactaattaatgggtttggcgtgcgtcgtgcatggagaatatagagaagcagtaacccgatgctggtgacaattaccgtcaaggcaatccagctggcgacaatcttttccccgaatagctctattccgctactgaagagaacaaggctgaggccaaacagcaaaaagccagtgatatcgaatctgcgtcgtgcggtggtgaaattgggcatatgtttgcgcgcgtaaagaaggcccgcaatacctatggggatattgattaaaaatatccagtgccaggttgcccaggtgaccagcacgccgccaagaacggggcctaaaattggccccaccagacccggcatggcgacaaaattcaatactggaagaagttcattacgaggataagcgcgcagtaaggccagccgagcaacaggcatcatcattgcgccgcctatcccctgaataacccggaagacaaccagctgtggtaggctattagaaagtgcgcaggccagagaacccaatgtgaacagactcacggcaagggtaaaaatgcgacgcgtaccgaagcgatcggctagccatccgcttaccggaataagcatcgccaccgtcagcgtataactgatgatggcactttgcatcgcgagaggagaacgattaaggctatgagcgattgcgggtaaggcggtattaagaatagtggcatcaagtgcctgcatgaagaaggccatcgccgcgatccacggcaaacccgccatactgcgcttctttttatcgctcattcaatgtcctgttatcgggttatcacttatcaggactgcgtagcagcgcctgacaagctttaaatgccgcgtcgccatcgctttggataatcgcatcgacaatcgcctgatgcagatccagctttatcactgtgtcgctggtaatactcgtgaagtaagtgtgataaacgctatggaataggctggcgaaactggtcaaaaacggattggcgctcatttcatagatatgctcatgccaggccatatcgacttcgatccagcgttcacggcgaaagttctcttttaatgccgccatttcggccattaacgtattgagatgcgctttctgttccgcggtgccaaccgttgctgccagtaggcaggcttgcggctccagacagatacgcataaccagaaagtgatcgatgacctgatgaaagttctcttctgtcatccaccaggtaagcaattcctgatcaagaaaattccagttgctttgtggcatgacccgagtaccaattcgcggtcgcggtaaaaccatcccttttgccgttaacgttttgaccgcttcgcgtaccgctgtacgactcactccaaattgctcgcccagctcaatctcaccgggcaaaatggtgccgggttcatattcaccttttaagatccgttgcgccagcttctcagccagaacatagctaaggtttttctgtgcagctaactgttgtgcgcttaaaggcattacttatcttcctttttctttttattcctccttagtatgccaccaggaagtgtgattacggttgcaaaaacggcaaattgcttgttttatggcacattaacggggcttttgctgaaaaaatgcgcggtcagaaaattattttaaatttcctcttgtcaggccggaataactccctataatgcgccaccactgacacggaacaacggcaaacacgccgccgggtcagcggggttctcctgagaactccggcagagaaagcaaaaataaatgcttgactctgtagcgggaaggcgtattatgcacaccccgcgccgctgagaaaaagcgaagcggcactgctctttaacaatttatcagacaatctgtgtgggcactcgaagatacggattcttaacgtcgcaagacgaaaaatgaataccaagtctcaagagtgaacacgtaattcattacgaagtttaattctttgagcgtcaaacttttaaattgaagagtttgatcatggctcagattgaacgctggcggcaggcctaacacatgcaagtcgaacggtaacaggaagaagcttgcttctttgctgacgagtggcggacgggtgagtaatgtctgggaaactgcctgatggagggggataactactggaaacggtagctaataccgcataacgtcgcaagaccaaagagggggaccttcgggcctcttgccatcggatgtgcccagatgggattagctagtaggtggggtaacggctcacctaggcgacgatccctagctggtctgagaggatgaccagccacactggaactgagacacggtccagactcctacgggaggcagcagtggggaatattgcacaatgggcgcaagcctgatgcagccatgccgcgtgtatgaagaaggccttcgggttgtaaagtactttcagcggggaggaagggagtaaagttaatacctttgctcattgacgttacccgcagaagaagcaccggctaactccgtgccagcagccgcggtaatacggagggtgcaagcgttaatcggaattactgggcgtaaagcgcacgcaggcggtttgttaagtcagatgtgaaatccccgggctcaacctgggaactgcatctgatactggcaagcttgagtctcgtagaggggggtagaattccaggtgtagcggtgaaatgcgtagagatctggaggaataccggtggcgaaggcggccccctggacgaagactgacgctcaggtgcgaaagcgtggggagcaaacaggattagataccctggtagtccacgccgtaaacgatgtcgacttggaggttgtgcccttgaggcgtggcttccggagctaacgcgttaagtcgaccgcctggggagtacggccgcaaggttaaaactcaaatgaattgacgggggcccgcacaagcggtggagcatgtggtttaattcgatgcaacgcgaagaaccttacctggtcttgacatccacggaagttttcagagatgagaatgtgccttcgggaaccgtgagacaggtgctgcatggctgtcgtcagctcgtgttgtgaaatgttgggttaagtcccgcaacgagcgcaacccttatcctttgttgccagcggtccggccgggaactcaaaggagactgccagtgataaactggaggaaggtggggatgacgtcaagtcatcatggcccttacgaccagggctacacacgtgctacaatggcgcatacaaagagaagcgacctcgcgagagcaagcggacctcataaagtgcgtcgtagtccggattggagtctgcaactcgactccatgaagtcggaatcgctagtaatcgtggatcagaatgccacggtgaatacgttcccgggccttgtacacaccgcccgtcacaccatgggagtgggttgcaaaagaagtaggtagcttaaccttcgggagggcgcttaccactttgtgattcatgactggggtgaagtcgtaacaaggtaaccgtaggggaacctgcggttggatcacctccttaccttaaagaagcgtactttgtagtgctcacacagattgtctgatagaaagtgaaaagcaaggcgtttacgcgttgggagtgaggctgaagagaataaggccgttcgctttctattaatgaaagctcaccctacacgaaaatatcacgcaacgcgtgataagcaattttcgtgtccccttcgtctagaggcccaggacaccgccctttcacggcggtaacaggggttcgaatcccctaggggacgccacttgctggtttgtgagtgaaagtcgccgaccttaatatctcaaaactcatcttcgggtgatgtttgagatatttgctctttaaaaatctggatcaagctgaaaattgaaacactgaacaacgaaagttgttcgtgagtctctcaaattttcgcaacacgatgatgaatcgaaagaaacatcttcgggttgtgaggttaagcgactaagcgtacacggtggatgccctggcagtcagaggcgatgaaggacgtgctaatctgcgataagcgtcggtaaggtgatatgaaccgttataaccggcgatttccgaatggggaaacccagtgtgtttcgacacactatcattaactgaatccataggttaatgaggcgaaccgggggaactgaaacatctaagtaccccgaggaaaagaaatcaaccgagattcccccagtagcggcgagcgaacggggagcagcccagagcctgaatcagtatgtgtgttagtggaagcgtctggaaaggcgcgcgatacagggtgacagccccgtacacaaaaatgcacatattgtgagctcgatgagtagggcgggacacgtggtatcctgtctgaatatggggggaccatcctccaaggctaaatactcctgactgaccgatagtgaaccagtaccgtgagggaaaggcgaaaagaaccccggcgaggggagtgaaaaagaacctgaaaccgtgtacgtacaagcagtgggagcacgcttaggcgtgtgactgcgtaccttttgtataatgggtcagcgacttatattctgtagcaaggttaaccgaataggggagccgaagggaaaccgagtcttaactgggcgttaagttgcagggtatagacccgaaacccggtgatctagccatgggcaggttgaaggttgggtaacactaactggaggaccgaaccgactaatgttgaaaaattagcggatgacttgtggctgggggtgaaaggccaatcaaaccgggagatagctggttctccccgaaagctatttaggtagcgcctcgtgaattcatctccgggggtagagcactgtttcggcaagggggtcatcccgacttaccaacccgatgcaaactgcgaataccggagaatgttatcacgggagacacacggcgggtgctaacgtccgtcgtgaagagggaaacaacccagaccgccagctaaggtcccaaagtcatggttaagtgggaaacgatgtgggaaggcccagacagccaggatgttggcttagaagcagccatcatttaaagaaagcgtaatagctcactggtcgagtcggcctgcgcggaagatgtaacggggctaaaccatgcaccgaagctgcggcagcgacgcttatgcgttgttgggtaggggagcgttctgtaagcctgcgaaggtgtgctgtgaggcatgctggaggtatcagaagtgcgaatgctgacataagtaacgataaagcgggtgaaaagcccgctcgccggaagaccaagggttcctgtccaacgttaatcggggcagggtgagtcgacccctaaggcgaggccgaaaggcgtagtcgatgggaaacaggttaatattcctgtacttggtgttactgcgaaggggggacggagaaggctatgttggccgggcgacggttgtcccggtttaagcgtgtaggctggttttccaggcaaatccggaaaatcaaggctgaggcgtgatgacgaggcactacggtgctgaagcaacaaatgccctgcttccaggaaaagcctctaagcatcaggtaacatcaaatcgtaccccaaaccgacacaggtggtcaggtagagaataccaaggcgcttgagagaactcgggtgaaggaactaggcaaaatggtgccgtaacttcgggagaaggcacgctgatatgtaggtgaagcgacttgctcgtggagctgaaatcagtcgaagataccagctggctgcaactgtttattaaaaacacagcactgtgcaaacacgaaagtggacgtatacggtgtgacgcctgcccggtgccggaaggttaattgatggggtcagcgcaagcgaagctcttgatcgaagccccggtaaacggcggccgtaactataacggtcctaaggtagcgaaattccttgtcgggtaagttccgacctgcacgaatggcgtaatgatggccaggctgtctccacccgagactcagtgaaattgaactcgctgtgaagatgcagtgtacccgcggcaagacggaaagaccccgtgaacctttactatagcttgacactgaacattgagccttgatgtgtaggataggtgggaggctttgaagtgtggacgccagtctgcatggagccgaccttgaaataccaccctttaatgtttgatgttctaacgtggacccgtgatccgggttgcggacagtgtctggtgggtagtttgactggggcggtctcctcctaaagagtaacggaggagcacgaaggttggctaatcctggtcggacatcaggaggttagtgcaatggcataagccagcttgactgcgagcgtgacggcgcgagcaggtgcgaaagcaggtcatagtgatccggtggttctgaatggaagggccatcgctcaacggataaaaggtactccggggataacaggctgataccgcccaagagttcatatcgacggcggtgtttggcacctcgatgtcggctcatcacatcctggagctgaagtaggtcccaagggtatggctgttcgccatttaaagtggtacgcgagctgggtttagaacgtcgtgagacagttcggtccctatctgccgtgggcgctggagaactgaggggggctgctcctagtacgagaggaccggagtggacgcatcactggtgttcgggttgtcatgccaatggcactgcccggtagctaaatgcggaagagataagtgctgaaagcatctaagcacgaaacttgccccgagatgagttctccctgactccttgagagtcctgaaggaacgttgaagacgacgacgttgataggccgggtgtgtaagcgcagcgatgcgttgagctaaccggtactaatgaaccgtgaggcttaaccttacaacgccgaagctgttttggcggatgagagaagattttcagcctgatacagattaaatcagaacgcagaagcggtctgataaaacagaatttgcctggcggccgtagcgcggtggtcccacctgaccccatgccgaactcagaagtgaaacgccgtagcgccgatggtagtgtggggtctccccatgcgagagtagggaactgccaggcatcaaattaagcagtaagccggtcataaaaccggtggttgtaaaagaattcggtggagcggtagttcagtcggttagaatacctgcctgtcacgcagggggtcgcgggttcgagtcccgtccgttccgccaccctaattaggggcgtagttcaattggtagagcaccggtctccaaaaccgggtgttgggagttcgagtctctccgcccctgccagaaatcatccttagcgaaagctaaggattttttttatctgaaataaccctctccgaagtaaatccttctaccggcatccttgccagccattcatattaatacacttcatccagcacgttaattttcaaaagatcgcgaatcaacgcatttttatcgctattttgcagccatatggcataaagcggccgactaagtgttgtgctatcgacaacggtatgcaggccgccttttttacgcgcccagctgacgggtagccaggtgcaaccattaagcatcgcaatctgttgctgtgccagttcagcagaactggttgtcagaatgggcacttcgtcagcaccgatcaaacctgcctcatgctgttgaaaatctggcccccactcaagtcgcagataattaagatctccctttagtttactaggggcactggtataaagcgctaaagtgaaatatcccagcaactgactactaaattcgtccattttgggcgcttcagtggtaataagaagatcaagctggcgttcatgcagctgttttaccagagactgccgttgggcaattcgcgcttcgaactgtaagcctgtatgggcatcctgattttgatacaagcgtcccagccactgattaagcatacattcccacaagctggcgctggcaccgatagaaaactcgttatgtcgactggtatgcgccacctccttacgggcggcctgccaggtgctcatgagcgtttctgcataaggcagtagtttttcaccggcagcggttaaacggatattgtttctgtggcgggtgaaaaggttcacacccagttgattttccagttgtctgattcgaaagctcactgcactctgggtcagatagaggctttcagccgctcgaccaaagtgacgcgttcggctaacttccaggaaagtttttaacaattccgtatccacagtgctctccgcaaaattatttgtcgttatgatttaaatgttttgttttacactctgtcaagcgtaactaatactccgcgccataactagctcggtcaaagaattaggagcgtgcaggatggcggaaagctttacgacgactaatcgatatttcgacaataaacattatccacgtggattctctcgtcatggtgatttcaccatcaaagaggcacaactgcttgagcgtcatggttatgccttcaatgagttggatcttggcaaacgcgagccggttaccgaggaagagaaactcttcgtagcagtatgccgtggcgaacgtgagccagtgacagaagcagaacgcgtgtggtccaagtatatgacgcgtattaagcgtccaaaacgttttcacaccctttccggcggtaaaccgcaggttgaaggtgctgaagactacaccgattctgacgattaataaaaagggcgaaatgccctttttttatgtcagtagtttctgcagatggatgagcaaacggtcaatcgctcgatagctaactgcctcctgcaaatgctgacgtgtgataatgtcagactgatcaatatcagcaatggttcgtgcaactttcaataaccgctgccaggcacgaatgcttaaccccagatggatcagtgttccttccaaccacatcgcatcttcgctctcaagtttgcagaattggcgtatttccggactatccagccaggcattcagtttattctgccgcttaaattggcgctctctggcggccattacgcgttgtttaacggtggcgctgctttctcccggcactaccgttttactcaaaatgccggggggtggtaatgggatctccagactgagatcgaagcggtcgagaaagggcccgctgagccggttgagataacgtaatgtctgttctggcgtgcagcggttatggtttccctgataatgtccggtagggctgggattcatcgccgcaacaagctggaaacgggctggataggttatttttgctcgtgtgcgactaagatggatctgcccggattcaatcggctctcgcaaggcatccagtgtacgccgttcaaattcaggtagctcatcaagaaaaagcacgccgttatgcgccaggctaatttcaccgggccctggaattgcgccaccgcctaccatcgcagttaagcttgcactgtgatgaggactgcggaacgggcgctgccgccattgtttttgtacactttcagcatttaccagacttaatatcgcagcactctccagtgcctcttcattgcttaaatctggcaacaggccattaatacggctggcgagcattgttttacctgttcccggcggcccaatcagtaaaaggttgtgcccgccagcagcggtaatttccagtcctcgctttccttgttcctgaccgataacatcactgagatcatgttgtagcgcccgggatactgcatcagttggtttcgggcgttcgagagcgtgcttaccttccagaaacgcacagacagcttgcagatgatcggctatcaggcatccttcaccgttaattagccccacttcatcttcgttatctttcgcgacgataatttttctgccgctcttaatagcttcagttgcactggagattgcgccgggaacgccacgcagagcgcctgtaagcgccagttctccgactaattcatattcatctaacttattggctgtaagctgttcactggccgccagcaacgcaatggcgataggtaaatcatatcgtcccccttcttttggcagatcagctggagccaggttgatggtgatttttttcgccggatattcatatccgctattgataatggcgctgcgcacgcgatcgcgagcttcttttaccgttgtttctggtaagcccaccatcgttaagccgggtagacctttactgatatgtacctcaacagtgatcgggggcgcatttactcccagggctgcgcgggtatgaacaatactcagactcataagccctccttgagtcaccattatgtgcataagatatcgctgctgtagcccgctaattcgtgaattttagtggctgattcctgtttatttgtgcaagtgaagttgagttgttctggcggtggaatgatgctcgcaaaaatgcagcggacaaaggatgaactacgaggaagggaacaacattcatactgaaattgaatttttttcactcactattttatttttaaaaaacaacaatttatattgaaattattaaacgcatcataaaaatcggccaaaaaatatcttgtactatttacaaaacctatggtaactctttaggcattccttcgaacaagatgcaagaaaagacaaaatgacagcccttctacgagtgattagcctggtcgtgattagcgtggtggtgattattatcccaccgtgcggggctgcacttggacgaggaaaggcttaaagatcaagccttaacgaactaagacccccgcaccgaaaggtccgggggttttttttgaccttaaaaacataaccgaggagcagacaatgaataacagcacaaaattctgtttctcaagattcaggacggggaactaactatgaatggcgcacagtgggtggtacatgcgttgcgggcacagggtgtgaacaccgttttcggttatccgggtggcgcaattatgccggtttacgatgcattgtatgacggcggcgtggagcacttgctatgccgacatgagcagggtgcggcaatggcggctatcggttatgctcgtgctaccggcaaaactggcgtatgtatcgccacgtctggtccgggcgcaaccaacctgataaccgggcttgcggacgcactgttagattccatccctgttgttgccatcaccggtcaagtgtccgcaccgtttatcggcactgacgcatttcaggaagtggatgtcctgggattgtcgttagcctgtaccaagcacagctttctggtgcagtcgctggaagagttgccgcgcatcatggctgaagcattcgacgttgcctgctcaggtcgtcctggtccggttctggtcgatatcccaaaagatatccagttagccagcggtgacctggaaccgtggttcaccaccgttgaaaacgaagtgactttcccacatgccgaagttgagcaagcgcgccagatgctggcaaaagcgcaaaaaccgatgctgtacgttggcggtggcgtgggtatggcgcaggcagttccggctttgcgtgaatttctcgctgccacaaaaatgcctgccacctgtacgctgaaagggctgggcgcagtagaagcagattatccgtactatctgggcatgctggggatgcacggcaccaaagcggcaaacttcgcggtgcaggagtgtgacctgctgatcgccgtgggcgcacgttttgatgaccgggtgaccggcaaactgaacaccttcgcgccacacgccagtgttatccatatggatatcgacccggcagaaatgaacaagctgcgtcaggcacatgtggcattacaaggtgatttaaatgctctgttaccagcattacagcagccgttaaatcaatgactggcagcaacactgcgcgcagctgcgtgatgaacattcctggcgttacgaccatcccggtgacgctatctacgcgccgttgttgttaaaacaactgtcggatcgtaaacctgcggattgcgtcgtgaccacagatgtggggcagcaccagatgtgggctgcgcagcacatcgcccacactcgcccggaaaatttcatcacctccagcggtttaggtaccatgggttttggtttaccggcggcggttggcgcacaagtcgcgcgaccgaacgataccgttgtctgtatctccggtgacggctctttcatgatgaatgtgcaagagctgggcaccgtaaaacgcaagcagttaccgttgaaaatcgtcttactcgataaccaacggttagggatggttcgacaatggcagcaactgttttttcaggaacgatacagcgaaaccacccttactgataaccccgatttcctcatgttagccagcgccttcggcatccatggccaacacatcacccggaaagaccaggttgaagcggcactcgacaccatgctgaacagtgatgggccatacctgcttcatgtctcaatcgacgaacttgagaacgtctggccgctggtgccgcctggcgccagtaattcagaaatgttggagaaattatcatgatgcaacatcaggtcaatgtaagcgctcgcttcaatccagaaaccttagaacgtgttttacgcgtggtgcgtcatcgtggtttccacgtctgcagtatgaatatggccgccgccagcgatgcacaaaatataaatatcgaattgaccgttgccagcccacggagcgtcgacttactgtttagtcagttaaataaactggtggacgtcgcacacgttgccatctgccagagcacaaccacaagtcaacaaatccgcgcctgagcgcaaaaggaatataaaaatgaccacgaagaaagctgattacatttggttcaatggggagatggttcgctgggaagacgcgaaggtgcatgtgatgagccacgcgctgcactatggcactagcgtttttgaaggcatccgttgctacgacagccacaaaggaccggttgtattccgccatcgtgagcatatgcagcgtctgcatgactccgccaaaatctatcgcttcccggttagccagagcattgatgagctgatggaagcttgtcgtgacgtgatccgcaaaaacaatctcaccagcgcctatatccgtccgctgatcttcgtcggtgatgttggcatgggagtaaacccgccagcgggatacagtaccgacgtgattatcgctgctttcccgtggggagcgtatctgggcgcagaagcgctggagcaggggatcgatgcgatggtttcctcctggaaccgcgcagcaccaaacaccatcccgacggcggcaaaagccggtggtaactacctctcttccctgctggtgggtagcgaagcgcgccgccacggttatcaggaaggtatcgcgctggatgtgaacggttatatctctgaaggcgcaggcgaaaacctgtttgaagtgaaagatggtgtgctgttcaccccaccgttcacctcctccgcgctgccgggtattacccgtgatgccatcatcaaactggcgaaagagctgggaattgaagtacgtgagcaggtgctgagccgcgaatccctgtacctggcggatgaagtgtttatgtccggtacggcggcagaaatcacgccagtgcgcagcgtagacggtattcaggttggcgaaggccgttgtggcccggttaccaaacgcattcagcaagccttcttcggcctcttcactggcgaaaccgaagataaatggggctggttagatcaagttaatcaataaatacaaaaaatgggacggcacgcaccgtcccatttacgagacagacactgggagtaaataaagtatgcctaagtaccgttccgccaccaccactcatggtcgtaatatggcgggtgctcgtgcgctgtggcgcgccaccggaatgaccgacgccgatttcggtaagccgattatcgcggttgtgaacagcttcacccaatttgtaccgggtcacgtccatctgcgcgatctcggtaaactggtcgccgaacaaattgaagcggctggcggcgttgccaaagagttcaacaccattgcggtggatgatgggattgccatgggccacggggggatgctttatagtctgccatctcgcgaactgatcgctgattccgttgagtatatggtcaacgcccactgcgccgacgccatggtctgcatctctaactgcgacaaaatcaccccggggatgctgatggcttccctgcgcctgaatattccggtgatctttgtttccggcggcccgatggaggccgggaaaaccaaactttccgatcagatcatcaagctcgatctggttgatgcgatgatccagggcgcagacccgaaagtatctgactcccagagcgatcaggttgaacgttccgcgtgtccgacctgcggttcctgctccgggatgtttaccgctaacagtatgaactgcctgaccgaagcgctgggcctgagccagccgggcaacggcagcctgctggcaacccacgccgaccgtaagcagctgttccttaatgctggtaaacgcattgttgaattgaccaaacgttattacgagcaaaacgacgaaagtgcactgccgcgtaatatcgccagtaaggcggcgtttgaaaacgccatgacgctggatatcgcgatgggtggaagcactaacaccgtacttcacctgctggcggcggcgcaggaagcggaaatcgacttcaccatgagtgatatcgataagctttcccgcaaggttccacagctgtgtaaagttgcgccgagcacccagaaataccatatggaagatgttcaccgtgctggtggtgttatcggtattctcggcgaactggatcgcgcggggttactgaaccgtgatgtgaaaaacgtacttggcctgacgttgccgcaaacgctggaacaatacgacgttatgctgacccaggatgacgcggtaaaaaatatgttccgcgcaggtcctgcaggcattcgtaccacacaggcattcagccaagattgccgttgggatacgctggacgacgatcgcgccaatggctgtatccgcagcctggaacacgcctacagcaaagacggcggcctggcggtgctctacggtaactttgcggaaaacggctgcatcgtgaaaacggcaggcgtcgatgacagcatcctcaaattcaccggcccggcgaaagtgtacgaaagccaggacgatgcggtagaagcgattctcggcggtaaagttgtcgccggagatgtggtagtaattcgctatgaaggcccgaaaggcggtccggggatgcaggaaatgctctacccaaccagcttcctgaaaagtatgggtctcggcaaagcctgtgcgctgatcaccgacggtcgtttctctggtggcacctctggtctttccatcggccacgtcagtccggaagcggcaagcggcggcagcattggcctgattgaagatggtgacctgatcgctatcgacatcccgaaccgtggcattcagttacaggtaagcgatgccgaactggcggcgcgtcgtgaagcgcaggacgctcgaggtgacaaagcctggacgccgaaaaatcgtgaacgtcaggtctcctttgccctgcgtgcttatgccagcctggcaaccagcgccgacaaaggcgcggtgcgcgataaaagcaaactggggggttaataatggctgacagccaacccctgtccggtgctccggaaggtgccgaatatttaagagcagtgctgcgcgcgccggtttacgaggcggcgcaggttacgccgctacaaaaaatggaaaaactgagcagccgtcttgataacgtcattctggtgaagcgcgaagatcgccagccagtgcacagctttaagctgcgcggcgcatacgccatgatggcgggcctgacggaagaacagaaagcgcacggcgtgatcactgcttctgcgggtaaccacgcgcagggcgtcgcgttttcttctgcgcggttaggcgtgaaggccctgatcgttatgccaaccgccaccgccgacatcaaagtcgacgcggtgcgcggcttcggcggcgaagtgctgctccacggcgcgaactttgatgaagcgaaagccaaagcgatcgaactgagtcagcagcaggggttcacctgggtgccgccgttcgaccatccgatggtgattgccgggcaaggcacgctggcgctggaactgctccagcaggacgcccatctcgaccgcgtatttgtgccagtcggcggcggcggtctggctgctggcgtggcggtgctgatcaaacaactgatgccgcaaatcaaagtgatcgccgtagaagcggaagactccgcctgcctgaaagcagcgctggatgcgggtcatccggttgatctgccgcgcgtagggctatttgctgaaggcgtagcggtaaaacgcatcggtgacgaaaccttccgtttatgccaggagtatctcgacgacatcatcaccgtcgatagcgatgcgatctgtgcggcgatgaaggatttattcgaagatgtgcgcgcggtggcggaaccctctggcgcgctggcgctggcgggaatgaaaaaatatatcgccctgcacaacattcgcggcgaacggctggcgcatattctttccggtgccaacgtgaacttccacggcctgcgctacgtcagtgaacgctgcgaactgggcgaacagcgtgaagcgttgttggcggtgaccattccggaagaaaaaggcagcttcctcaaattctgccaactgcttggcgggcgtagcgtcaccgagttcaactaccgttttgccgatgccaaaaacgcctgcatctttgtcggtgtgcgcctgagccgcggcctcgaagagcgcaaagaaattttgcagatgctcaacgacggcggctacagcgtggttgatctctccgacgacgaaatggcgaagctacacgtgcgctatatggtcggcggacgtccaagccatccgttgcaggaacgcctctacagcttcgaattcccggaaagtccgggcgcgctgctgcgcttcctcaacacgctgggtacgtactggaacatttctttgttccactatcgcagccatggcaccgactacgggcgcgtactggcggcgttcgaacttggcgaccatgaaccggatttcgaaacccggctgaatgagctgggctacgattgccacgacgaaaccaataacccggcgttcaggttctttttggcgggttaaggaaaaatgcctgatagcgcttcgcttatcaggcctacccgcgcgacaacgtcatttgtggttcggcaaaatcttccagaatgcctcaattagcggctcatgtagccgctttttctgcgcacacacgcccagctcaaacggcgttttctcatcgctgcgctctaaaatcatcacgcggttacgcaccggttcggggctgttttccagcaccacttccggcaacaatgccacgccacagccgagtgccaccatgcttaccatcgcttcatgcccgccaaccgtggcgtaaatcatcgggttactgattttattgcgtcgaaaccacagttcaatgcggcggcgtaccggcccctgatcggccataataaacggcaccgtactccagtccggcttctctacgctcacctgattacgcaccgggcagggcagcgcgggggcaatcagcactactgccagattctccagcatgctaaacgccactgcgccgggcaaggtttccggtttacccgcaatcgccagatccgcttcaccagtgaccaccttttccatcgcatctgccgcatcaccagtagtaagtttaatctccacgctcgggtgttccgcgcggaagcgatccagaatcggcggcagatggctgtaggcagcggtcacgctgcagaagatatgtaattcgccagagaggctcggcccttgctgatcgatggtgtggcgcaactgctgatactgcaacagcgtttgctgggcgaaaacgcgcagctcttcgcccgcttcagtcagcgtcaccgtgcggttatcgcgcacaaacagcggctgaccgagatcttcttccaggcgctgaatctgccgactgagcgtggatgggctaacgtgcatcgcccgcgcgctgcggccaaaatggcggctttccgccagatgcaggaaggttttcagatcgcgtaaatccacagggacagccctcgatgttgacgttgcaaaaattgcaatgtgacgttgtgaatatatcaatttccgcaataaatttcctgtcatatagtgaattcaatctcgcaaacgcgaaccgaacaataagaagcacaacatcacgaggaatcaccatggctaactacttcaatacactgaatctgcgccagcagctggcacagctgggcaaatgtcgctttatgggccgcgatgaattcgccgatggcgcgagctaccttcagggtaaaaaagtagtcatcgtcggctgtggcgcacagggtctgaaccagggcctgaacatgcgtgattctggtctcgatatctcctacgctctgcgtaaagaagcgattgccgagaagcgcgcgtcctggcgtaaagcgaccgaaaatggttttaaagtgggtacttacgaagaactgatcccacaggcggatctggtgattaacctgacgccggacaagcagcactctgatgtagtgcgcaccgtacagccactgatgaaagacggcgcggcgctgggctacagccacggtttcaacatcgtcgaagtgggcgagcagatccgtaaagatatcaccgtagtgatggttgcgccgaaatgcccaggcaccgaagtgcgtgaagagtacaaacgtgggttcggcgtaccgacgctgattgccgttcacccggaaaacgatccgaaaggcgaaggcatggcgattgccaaagcctgggcggctgcaaccggtggtcaccgtgcgggtgtgctggaaagctccttcgttgcggaagtgaaatctgacctgatgggcgagcaaaccatcctgtgcggtatgttgcaggctggctctctgctgtgcttcgacaagctggtggaagaaggtaccgatccagcatacgcagaaaaactgattcagttcggttgggaaaccatcaccgaagcactgaaacagggcggcatcaccctgatgatggaccgtctctctaacccggcgaaactgcgtgcttatgcgctttctgaacagctgaaagagatcatggcacccctgttccagaaacatatggacgacatcatctccggcgaattctcttccggtatgatggcggactgggccaacgatgataagaaactgctgacctggcgtgaagagaccggcaaaaccgcgtttgaaaccgcgccgcagtatgaaggcaaaatcggcgagcaggagtacttcgataaaggcgtactgatgattgcgatggtgaaagcgggcgttgaactggcgttcgaaaccatggtcgattccggcatcattgaagagtctgcatattatgaaagtctgcacgagctgccgctgattgccaacaccatcgcccgtaagcgtctgtacgaaatgaacgtggttatctctgataccgctgagtacggtaactatctgttctcttacgcttgtgtgccgttgctgaaaccgtttatggcagagctgcaaccgggcgacctgggtaaagctattccggaaggcgcggtagataacgggcaactgcgtgatgtgaacgaagcgattcgcagccatgcgattgagcaggtaggtaagaaactgcgcggctatatgacagatatgaaacgtattgctgttgcgggttaagtgcgcgctgatgccctcaccccgaccctctcccacagggagagggagaaaacactcaaggccttctcctggagaaggccttgctattagttgcggtacagcaccttaatgatgtgatatccgaactgggtgtgcagcgggccggtcggctccagtaccggacaagagaaaaccactttatcgaacgccggaaccatctgaccctggcggaattcacctaaatcaccgccgcgtttgccacttgggcaaatggagtgtttcttcgccagcttgccgaaatcggccccgttcttaatctgctcgagaagatccagagccagtttctcttcttttacaaggatatgcagtgctgctgctgtttttgccatgatcgtgccttgagtgaataattgtcaggcggcgattttagcatgatccgcagatgctaacgtaattgtcagtcagggagtggctggtacatatatggcaaaagcccggaaaatccgggcttcgcaggtccctcaaggggagaaaacttagggcctctatgggctacaaagtcattatcggggatggttattttattgtcaatttatgaggcttatggcattgatactcttgatgaccgccctctgtatgtctgcaaccaactcatgtggcaaacattgattaagataccctctgtaagtccttgctctgtttaatctgtttcgactgacttgttgtaccaggtcggctttggcccaacgaatctgctgatcaaagaattgcaggtcattgataacattactggctatttcaacatgcattccacgttttaacttgtctggtcggctgtggttgataatggaacgacgatgcatgcgttgccattaatttttccgttgagcacgacaactaacctgttttttatcatttcaggaggaatgcggccatcgtaatacgtcgtgctgaacggtccattttggctaacaggatagttaccaaagttgcattccagtatttcaccaaccttagggctgaaattaatcgccacgagtaaacctctccttagtaaactctgaaaaagtaataacacaacgttacgacccgatattttctaagtctaatggattcacgatgaactccgatttcggtcttctctctctgatttaaacatccgcagccaaccggttagcggcttacacgcggtcacattcaaatgcgattctgctacaatcctccccccgttcgaagattgagcaatacacctatgcgtctaaaccccggccaacaacaagctgtcgaattcgttaccggcccctgcctggtgctggcgggcgcgggttccggtaaaactcgtgttatcaccaataaaatcgcccatctgatccgcggttgcggttatcaggcgcggcacattgcggcggtgacctttactaataaagcagcgcgcgagatgaaagagcgtgtagggcagacgctggggcgcaaagaggcgcgtgggctgatgatctccactttccatacgttggggctggatatcatcaaacgcgagtatgcggcgcttgggatgaaagcgaacttcagcttgtttgacgataccgatcagcttgctttgcttaaagagttgaccgaggggctgattgaagatgacaaagttctcctgcaacaactgattagcaccatctctaactggaagaatgatctcaaaacaccgtcccaggcggcagcaagtgcgattggcgagcgggaccgtatttttgcccattgttatgggctgtatgatgcacacctgaaagcctgtaacgttctcgacttcgatgatctgattttattgccgacgttgctgctgcaacgcaatgaagaagtccgcaagcgctggcagaacaaaattcgctatctgctggtggatgagtatcaggacaccaacaccagccagtatgagctggtgaaactgctggtgggcagccgcgcgcgctttaccgtggtgggtgacgatgaccagagcatctactcctggcgcggtgcacgtccgcaaaacctggtgctgctgagtcaggattttccggcgctgaaggtgattaagcttgagcagaactatcgctcttccgggcgtattctgaaagcggcgaacatcctgatcgccaataacccgcacgtctttgaaaagcgtctgttctccgaactgggttatggcgcggagctaaaagtattaagcgcgaataacgaagaacatgaggctgagcgcgttactggcgagctgatcgcccatcacttcgtcaataaaacgcagtacaaagattacgccattctttatcgcggtaaccatcagagccgggtgtttgaaaaattcctgatgcaaaaccgcatcccgtacaaaatatctggtggtacgagctttttctctcgtcctgaaatcaaggacttgctggcttatctgcgcgtgctgactaacccggacgatgacagcgcatttctgcgtatcgttaacacgccgaagcgagagattggcccggctacgctgaaaaagctgggtgagtgggcgatgacgcgcaataaaagcatgtttaccgccagctttgatatgggcctgagtcagacgcttagcggacgtggttatgaagcattgacccgcttcactcactggttggcagaaatccagcgtctggcggagcgggagccgattgccgcggtgcgtgatctgatccatggcatggattatgaatcctggctgtacgaaacaagccccagcccgaaagccgccgaaatgcgcatgaagaacgtcaaccaactgtttagctggatgacggagatgctggaaggcagtgaactggatgagccgatgacgctcacccaggtggtgacgcgctttactttgcgcgacatgatggagcgtggtgagagtgaagaagagctggatcaggtgcaactgatgactctccacgcgagcaaagggctggagtttccttatgtctacatggtcggtatggaagaagggtttttgccgcaccagagcagcatcgatgaagataatatcgatgaggagcggcggctggcctatgtcggcattacccgcgcccagaaggaattgacctttacgctgtgtaaagaacgccgtcagtacggcgaactggtgcgcccggagccgagccgctttttgctggagctgccgcaggatgatctgatttgggaacaggagcgcaaagtggtcagcgccgaagaacggatgcagaaagggcaaagccatctggcgaatctgaaagcgatgatggcggcaaaacgagggaaataatcaaggccggaaaagatgcgtcagcatcgcatccggcacttactcattaatgcacttccagcggccagtggacatagctctgccactggctttcctgagcaataatctctttacccagcggatgttgggttagccaaccttgcggaagcgtcaaggtcaacagttcatggttagcctgtaatgtcatctctggcacgagatcgtcacggcgacggctggcaaaaatgatggccaggcgtagtaaacggcagagttgttctgcgacgcgcggcggtacggcattttgctgatgcaggctactgagatcgaccggattagtctggttgagcagtagcgtcgccagcaattttttctgtgcgggggtaaaaccgggaagatccagattacgcaccagataagcagcgtgttgcggcgcttgtttgaagtcaacgctcaggccgatttcatgaagctgacaggcgctgatgagcaaatcgcggcttattgcttcaagatgccattcgttttccacctgatcgaagaagttagccgcaactttggctacgcgctgtgcctgatcaatatcgatcataaagcggcgttgaatattacgcagcgtacggctgcgaatatcctgctcgacggccagatgcaacatgccgtagaccaggccttcacgcagcgcaccgcccgccagggtcatacactgaatattcagttcggtaaaaatggcgatcaggatcgccagaccactcgggaacactaacgcacgttccagcgtcagcccgtcaatctccagttcctccagccgaccgcaatgaatggctcgctgtttcaattgctgcaacttttccagggtaatgcgttcatccatcccctgtgccatcatgatttcctgtaacgcctgcacggtgccggaagcaccaacgcacactttccagccgtgataccgtaattcatcggcaaccggacgtaacacttcgcgtgccgctttttctgcagcatcaaaattttcctgccccagattacgatcggcaaaatagcgttccagccaggtgacgcagcccatgctcaggctgaacaagctggtggtttgtgcacccgtgccggttaccagttcagtactggctccgcctatatccaccaccaggcgctgatcggcaccaccagtggtgtgagcaacgccctgataaatcagacgtgcttcctcttcaccgctgatcacctgtaccggacaaccgagaatttcctgcgctttggcaataaaatcacccgcattgacggcaaggcgtaacgtcgccgtagcgacaacgcgaatttggctgggaggaatatcttgcagacgttcagcaaacaggcgcaaacattgccaaccgcgctccattgcttcattggagagggcattttcgctattcaggccagcagccagacgcactttgcgttttattcgcgtcagcgtctggatgcttccagccacctcgcgcacaaccagcatatgaaaactattgctaccgagatcaatggctgcatacaggctgctggtggaacccatactcttcatccttcaatctgtctctgtgttggctgcattctttcacctgaatcacttactacagtaagctcatcgggattcattctcttgccatcttgatacagtttgaatgattttgagtatgacattttttatttaaccactacgacgacgattacgcggagcgccagtacgacgcggaccattgcctgtgcgcgggcgcgtgaggcgcagcggttttggcagatcggtcatcaatgcgtccggattgtatttgcttaccggaatactgtgaccaatataggtctcaatagcaggcaaattcaatgcatactcttcacacgccaggctgatagagtgaccgcttgcgcctgcgcgacctgtacgaccaatacggtgaacgtaatcttcacagtcatcgggtaaatcgtagttaaagacgtgcgtcactgccggaatatgcaaaccacgcgcggcaacgtcggtggcaaccagaatatccagatcgccacgggtaaattcatcaagaatacgcagacgttttttctgcgcgacatcgcctgtcaataaaccgacacgatgaccatctgctgccaggtggccccagatctcttcacaacggtgtttggtgttggcgaaaataatcgctctgtctggccactcttcttcgatcagcgtttgcagcaaacgcattttttcttcgttagaagggtagaaaagctcttctttaatacggtggcccgttttctgttccggttccacttcaatatattcggcattgttcatctgctcgaacgccagttcacgtacccggtagctaagcgtggcggagaacagcatgttgaggcgctggtttgcaggcggcatacggcggaacagccagcggatatctttaataaagcccagatcgtacatgcgatcggcttcgtccagtaccaccacctgaatggcaccgaggttaatgtggttctgcttggcgtagtcaattaaacgccccgtggtgccaatcagaatgtcaacgccgctttccagcactttcagctgtttgtcgtagccatcaccaccgtaagccagacccagcttcaggccagtagcttccgccagcggttctgcgtcggcatggatctgcacggcaagttcacgcgtcggtgccataattaaggcacgcggctgattcaccttgcgatcggcaatcgcaggatgagagagaagataatgaaacgtactcgtaagaaacgccatcgttttcccggtaccggtttgcgcctgcccggctacgtcacgacccgccagcgtcagcggaagggccagtgcctgaatgggcgtacagttatgaaacccttttttttcaagggcttctacaaccttcggatgcagggcgaagtcggaaaacttctgttctgttaaatgtgttttgctcatagtgtggtagaatatcagcttactattgctttacgaaagcgtatccggtgaaataaagtcaacctttagttggttaatgttacaccaacaacgaaaccaacacgccaggcttattcctgtggagttatatatgagcgataaaattattcacctgactgacgacagttttgacacggatgtactcaaagcggacggggcgatcctcgtcgatttctgggcagagtggtgcggtccgtgcaaaatgatcgccccgattctggatgaaatcgctgacgaatatcagggcaaactgaccgttgcaaaactgaacatcgatcaaaaccctggcactgcgccgaaatatggcatccgtggtatcccgactctgctgctgttcaaaaacggtgaagtggcggcaaccaaagtgggtgcactgtctaaaggtcagttgaaagagttcctcgacgctaacctggcgtaagggaatttcatgttcgggtgccccgtcgctaaaaactggacgcccggcgtgagtcatgctaacttagtgttgacttcgtattaaacataccttattaagtttgaatcttgtaatttccaacgcttcccgttttatcttaaatgcgaagtgaacagatttctggcagcagtctcaatccgtcttgtcgtttcagttctgcgtactctcctgtgaccaggcagcgaaaagacatgagtcgatgaccgtaaacaggcatggatgatcctgccataccattcacaacattaagttcgagatttaccccaagtttaagaactcacaccactatgaatcttaccgaattaaagaatacgccggtttctgagctgatcactctcggcgaaaatatggggctggaaaacctggctcgtatgcgtaagcaggacattatttttgccatcctgaagcagcacgcaaagagtggcgaagatatctttggtgatggcgtactggagatattgcaggatggatttggtttcctccgttccgcagacagctcctacctcgccggtcctgatgacatctacgtttcccctagccaaatccgccgtttcaacctccgcactggtgataccatctctggtaagattcgcccgccgaaagaaggtgaacgctattttgcgctgctgaaagttaacgaagttaacttcgacaaacctgaaaacgcccgcaacaaaatcctctttgagaacttaaccccgctgcacgcaaactctcgtctgcgtatggaacgtggtaacggttctactgaagatttaactgctcgcgtactggatctggcaagtcctatcggtcgtggtcagcgtggtctgattgtggcaccgccgaaagccggtaaaaccatgctgctgcagaacattgctcagagcattgcttacaaccacccggattgtgtgctgatggttctgctgatcgacgaacgtccggaagaagtaaccgagatgcagcgtctggtaaaaggtgaagttgttgcttctacctttgacgaacccgcatctcgccacgttcaggttgcggaaatggtgatcgagaaggccaaacgcctggttgagcacaagaaagacgttatcattctgctcgactccatcactcgtctggcgcgcgcttacaacaccgttgttccggcgagtggtaaagtgttgaccggtggtgtggatgccaacgccctgcatcgtccgaaacgcttctttggtgcggcgcgtaacgtggaagagggcggcagcctgaccattatcgcgacggcgcttatcgataccggttctaaaatggacgaagttatctacgaagagtttaaaggtacaggcaacatggaactgcacctctctcgtaagatcgctgaaaaacgcgtcttcccggctatcgactacaaccgttctggtacccgtaaagaagagctgctcacgactcaggaagaactgcagaaaatgtggatcctgcgcaaaatcattcacccgatgggcgaaatcgatgcaatggaattcctcattaataaactggcaatgaccaagaccaatgacgatttcttcgaaatgatgaaacgcagttaaatttgtcttatgccaaaaacgccacgtgtttacgtggcgttttgcttttatatctgtaatcttaatgccgcgctggcgatgttaggaaaattcctggaatttgctggcatgttatgcaatttgcatatcaaatggttaatttttgcacaggactggtgggtttggaacggactttcccttctgaataaaggtcttcgtggttatacttctgctaataattttctctgagagcatgcattgtgaatttactgacagtgagtactgatctcatcagtatttttttattcacgacactgtttctgttttttgcccgtaaggtggcaaaaaaagtcggtttagtggataaaccaaacttccgcaaacgtcaccagggattgatacctctcgttggggggattagcgtttacgcagggatttgcttcacgttcggaattgtcgattactatattccgcatgcatctctctatctcgcttgtgccggtgtgcttgttttcattggcgcgctggatgaccgttttgatatcagcgtaaaaatccgtgccaccatacaggccgctgttggcattgttatgatggtgttcggcaagctttatctcagtagcctgggttatatctttggctcctgggagatggtgctcggaccgtttggttacttcctgacgctatttgccgtctgggcggccattaatgcgttcaacatggttgatggcattgatggcttgctgggcgggttgtcctgcgtcagctttgcagcaatcggtatgattttgtggttcgacgggcaaaccagcctcgcaatctggtgctttgcgatgatcgccgccatcctgccatacatcatgcttaaccttggtatcctgggtcgccgctacaaagtctttatgggtgatgcgggcagtacgctgattggttttaccgttatctggatcctgctcgaaacgacccagggcaaaacccatcccatcagcccggttaccgctttgtggataatcgccattccgctaatggatatggtggcgattatgtaccgtcgcctgcgtaaaggcatgagcccattctctcctgaccgtcagcatattcaccatttgatcatgcgtgccgggtttacttcccgtcaggcgtttgtgctgattacccttgccgcagcactgctcgcttccattggcgtgctggcagaatattctcattttgtcccggagtgggtcatgctggtgctctttttgctagcattcttcctctatggatattgcattaagcgtgcctggaaagttgctcgctttattaagcgcgtaaaacgcagactgcgtagaaatcgtggtggcagccccaatttaaccaaataaatgaggatgtgatgacacaaccaatgcctgggaaaccggccgaagacgctgaaaatgaactggatattcgtgggttgtttcgtaccttgtgggctgggaagctatggattattggcatggggctggcgtttgcgttaatcgcgctggcgtatacgttttttgctcgtcaggagtggagcagcacggcgattaccgatcgtccaacggtgaatatgctggggggatattacagccagcagcaatttttgcgtaacctggatgtccgtagtaacatggcttctgccgaccaaccaagcgtcatggacgaagcctataaagagtttgttatgcaactggccagctgggatacccgcagagagttctggctgcaaaccgactattacaaacagcggatggtgggcaacagcaaagccgatgcggcgttgctggatgaaatgattaacaacatccagtttatccccggagactttacccgcgcggtcaatgacagcgtgaagcttattgccgaaaccgcgcctgacgctaataacctgttacgtcagtatgttgcttttgccagccagcgtgcagccagccatctgaatgatgagctgaaaggcgcatgggcggcgcgtaccatccagatgaaagctcaggtgaagcgtcaggaagaggtggcgaaagccatctacgaccgccggatgaacagcattgagcaggcgctgaaaattgctgagcagcataatattagccgcagtgcgacagatgtacctgccgaggaattacctgatagtgaaatgttcctgcttgggcgtccaatgcttcaggctcgactggaaaatttacaggccgtcggtccggcctttgatctcgactatgatcagaatcgggccatgttaaacaccctgaatgttggtccaaccctggatccgcgttttcagacctatcgctatttgcgtacgccggaagaaccggtaaaacgcgatagcccacgtcgtgccttcctgatgattatgtggggcattgtcggggggctgatcggggctggtgtcgcattaacccgccgttgcagcaaataacaacactgctgcggtgagcgcaaaggcgctcgccgcttattcgaagagaatcgatgtgaaagtactgactgtatttggtacgcgcccggaagccatcaagatggcgccgttggtgcatgcgttggcaaaagatcctttttttgaggctaaagtttgcgtcactgcgcagcatcgggagatgctcgatcaggtgctgaaactcttttccattgtacctgactacgatctcaacataatgcagccaggacagggcctgacagagataacctgtcggattctggaagggctaaaacctattcttgccgagttcaaaccagacgtcgtgctggttcacggcgatacgacgacgacgctggcaaccagcctggcggcgttttatcagcgtattcctgttggtcacgttgaggctggtctgcgcacgggcgatctctatagcccgtggccggaagaggctaaccgtacattgaccgggcatctggcgatgtatcacttctctccaaccgaaacttcccggcaaaacttgctgcgtgaaaacgttgcggatagccgaatcttcattaccggtaatacagtcattgatgcactgttatgggtgcgtgaccaggtgatgagcagcgacaagctgcgtagtgaactggcggcaaattacccgtttatcgaccccgataaaaagatgattctggtgaccggtcacaggcgtgagagtttcggtcgtggctttgaagaaatctgccacgcgctggcagacatcgccaccacgcaccaggacatccagattgtctatccggtgcatctcaacccgaacgtcagagaaccggtcaatcgcattctggggcatgtgaaaaatgtcattctgatcgatccccaggagtatttaccgtttgtctggctgatgaaccacgcctggctgattttgaccgacagtggcggcattcaggaagaagcgcctagcctggggaaacctgtgctggtgatgcgcgataccactgagcgtccggaagcggtgacggcgggtacggtgcgtctggtaggcacggataagcagcgaattgtcgaggaagtgacgcgtcttttaaaagacgaaaacgaatatcaagctatgagccgcgcccataacccgtatggtgatggtcaggcatgctctcgcattctggaagcgttaaaaaataatcggataagtctatgagttttgcgaccatttctgttatcggactgggttatatcgggctgccaacggcagcagcgtttgccagtcggcaaaaacaggtaattggtgtcgatatcaaccaacatgcggttgataccatcaatcgtggcgaaatccatatcgtcgaacctgatttggcgagtgtagtaaaaactgccgtagaaggcggttttttacgagcgagcacgacgccagttgaagcggatgcctggctgattgctgtacccacgccgtttaagggcgatcatgagccagatatgacctacgttgaaagcgctgctcgctccattgcgccagtgctgaaaaaaggcgcgctggtgatccttgaatccaccagcccggtggggagtaccgagaagatggcagaatggttagcagagatgcgtccggatctcactttcccgcagcaggtgggcgagcaggcggacgtcaacattgcttactgcccggaacgcgtgttaccaggacaggtaatggtcgagctgattaaaaacgatcgcgtgattggtggtatgacgccggtttgtagcgcccgcgccagcgaactgtacaaaattttcctcgaaggtgagtgtgtcgtcactaacagccggacggcggaaatgtgtaagctcaccgaaaacagcttccgcgatgtgaatatcgcttttgctaatgaattgagcctgatttgtgccgatcaggggattaacgtctgggaactgattcgcctggcgaatcgtcaccctcgcgttaatattcttcagcctggccctggcgtgggcggtcactgcattgctgttgatccgtggtttatcgtggcacagaacccccagcaggcgcggcttatccgtaccgcgcgcgaagtgaacgatcacaaaccgttctgggttatcgatcaggtgaaagcggcggtggctgattgcctggcggctaccgataaacgcgccagtgaactgaaaatcgcctgctttggtctggcgtttaaaccgaatattgatgacctgcgcgaaagcccggcgatggaaatcgctgaactgatcgcccagtggcatagcggcgaaactctggttgttgagcctaacatccaccagttgccgaaaaaactgaccgggctttgtactctggcgcagcttgacgaggcgctggcaacggcagacgtgctggtgatgctggtcgatcatagtcagttcaaagttatcaatggcgacaatgtccatcagcagtatgtcgtcgatgccaaaggagtctggcgctgatgagaaaaattctgataacaggtggtgccgggtttattggcagcgcgctggtgcgttatatcatcaacgaaacgagcgacgcggtggtagtggtcgataagctgacctacgccggaaacctgatgagcctggcaccggtcgcgcaaagcgagcgctttgcctttgagaaagttgatatctgcgatcgggcagaactggcacgcgtattcactgagcatcagccagactgtgtcatgcatctggcagccgaaagccatgttgaccgttctattgacggcccggcagcgtttattgaaaccaacattgtcgggacttatacattgcttgaagcggcgcgggcttactggaatgcgctgacggaagataaaaaaagtgcgttccgttttcatcatatctccactgacgaagtatatggtgacctgcacagcacggatgatttcttcaccgaaaccacgccgtatgcgccgagcagcccttattccgcgagtaaagccagcagcgaccatctggtgcgcgcctggctgcggacctatggtctgccgacgcttatcaccaactgcagcaataactacggcccttaccactttccggaaaaactgatcccgctgatgatcctcaacgcgctggcgggtaaaagcctgccggtatatggcaacgggcagcaaatccgtgactggctgtatgtggaagatcacgcccgcgcgctgtattgcgtggcgaccaccgggaaagtcggtgaaacctataatattggtggtcacaacgagcgtaagaatctcgatgttgtggaaaccatttgcgagctgctggaagaactggctccgaacaagccgcacggcgtggcgcactatcgtgacctgatcacctttgtcgctgaccgtccggggcatgatctgcgttatgccattgatgctagcaaaattgcccgtgaacttggctggctgccgcaggaaacctttgaaagtggaatgcgtaaaacggttcagtggtatctggctaatgaaagctggtggaagcaggtgcaggacggcagctatcagggcgagcgtttaggtctgaaaggctaattttcagcggaggcaaacatgaaaggtattatcctggcgggcggttccggcacccgattgcatccgattacgcgcggcgtaagcaagcaactgttgccgatttacgataagccaatgatttactatccgctgagcgtgctgatgctggccggtatccgcgaaattctcatcatcactacgccggaagataaaggttatttccagcgcctgctgggcgatggtagtgagttcggtatccagctggaatatgccgaacagcccagcccggacggtctggcgcaggcctttatcatcggtgaaaccttccttaatggtgaaccttcttgtctggtgctgggcgataacatcttcttcggtcagggcttcagtccgaagctgcgtcatgttgcggcgcgcaccgaaggggcgacggtttttggctatcaggtgatggacccggaacgctttggcgtggtggagtttgacgacaatttccgcgctatcagcctggaagaaaagccaaaacagccgaagagtaactgggcggtgaccgggctttatttctacgacagtaaagtcgtggagtacgcaaagcaggtgaagccgagcgagcgtggtgaactggagattacctccatcaaccagatgtacctcgaggcgggcaacctgaccgttgaactgctcgggcgcggatttgcctggctggataccggcactcacgacagcctgattgaagccagcacctttgtacagacggtggaaaaacgccagggctttaagattgcctgcctggaagagattgcctggcgtaacggctggctcgatgacgagggtgtgaagcgtgctgccagtagtttagcgaaaactggctacggccaatatctgctggagttacttcgtgcccgtccgcgccagtattgagccactaacctgggaaaacgccttctttggtgttaacagcgccatcgtgcgcattacgtctgaagcaccgctcctgacgccagacgcgttagcgccgtggtcacgggtgcaggccaaaattgcggcaagtaatacgggtgaactggatgccctgcaacagctgggattctccctggtagaaggtgaagttgatttggcgctacccgtgaacaatgccagtgatagcggtgctgtagtggcacaagagaccgatattcccgcattacgtcagttagccagcgccgcatttgcgcaaagccgttttcgtgcgccgtggtatgcgcctgacgccagcagtcgcttttatgcacagtggattgaaaatgccgtgcgcggcacctttgatcatcaatgtctgattttacgtgcggcgtccggcgatattcgcggctatgtctctttacgggaactcaatgcgacagatgcgcgaattggcctgctggctggacgcggtgcaggtgctgagctgatgcaaacggcgctaaactgggcgtatgctcgcggtaaaacaactttgcgggtggcgacccaaatgggcaacaccgccgcgcttaaacgatacatacaaagtggtgcgaatgtagaaagcaccgcgtactggttatacaggtgatcacatgattccatttaacgcaccgccggtggtgggaaccgaactcgactatatgcagagcgcaatgggtagcggcaaactgtgtggcgatggcggttttacccgtcgctgccagcagtggctggagcaacgttttggcagcgccaaagtgttactgacgccgtcctgcaccgctagcctggagatggcggcgctgctgctcgatatccagcctggcgatgaagtgatcatgccgagctacacctttgtctccaccgccaatgcctttgtgctgcgtggcgcaaaaatcgtttttgtggatgttcgcccggacaccatgaacatcgacgaaacgctgattgaagcggcgatcaccgacaaaacgcgcgttatcgtgccggtccattacgcgggtgtggcctgcgaaatggacaccattatggcgttggcgaaaaagcataatttgtttgtggtagaagatgccgctcagggcgtgatgtccacttacaaagggcgtgcactgggaaccattggtcatattggctgctttagcttccatgaaaccaaaaactacacggcgggcggtgaaggcggcgcgacgctgattaacgataaagcgttaatcgaacgagccgagatcatccgtgaaaagggcactaaccgcagccagttcttccgtggtcaggtcgataaatatacctggcgcgatattggctccagctatttgatgtccgatctgcaagctgcatacctgtgggcgcaactggaagcagcggatcgtatcaaccagcaacgtctggcgctgtggcaaaactactacgatgcgttagcgcctctggcgaaagccgggcgtatcgagctgccgagcattcccgatggctgcgtgcagaacgcgcatatgttctacattaaactgcgggatattgatgaccggagcgcgttgattaactttctgaaagaagcggaaatcatggcggtgtttcattacattccgctgcacggttgccctgcgggggaacactttggtgagttccacggtgaagatcgctacaccaccaaagagagcgagcgcctgctgcgcctgccgctgttctacaacctgagccccgtcaatcagcgtacggtaattgcgactttgttgaactacttttcctgatatgagcttggcaaaagcgtccttgtggacggcggccagtacactggtcaagattggtgccgggttactggtcggtaagttgctggcggtgagttttggtccggcggggcttgggctggcggcaaatttccgccagttgattaccgtgctcggcgtgcttgccggggctggcatctttaacggtgtaaccaaatacgttgcccagtaccatgataatccgcaacagctgcgccgcgtggtcggcactagtagtgcgatggtacttggtttctctacgctgatggcgctggtttttgtgctggcagctgcgccaatcagccagggattgtttggtaataccgactatcaggggctggtgcgtttagtggcgctggtgcaaatggggatcgcctggggcaacctgttactggcgctgatgaaaggctttcgcgatgccgcaggtaatgcgttaagcctgattgtcggcagcttgattggcgttctcgcgtactacgtcagttaccgtttgggcggttatgaaggggcgttgctgggtctggcgctgattcccgcgctggtggtaattcctgccgccatcatgttgatcaaacgtggtgtcatcccgttaagctatctgaaacccagctgggataacggtctggcagggcagttgagcaaatttacgctcatggcgttgattacgagcgtgaccttgcctgttgcttacatcatgatgcgtaaactgctggcggcgcagtatagctgggatgaggtggggatctggcaaggggtgagcagtatttccgatgcctacctgcaatttattacggcaagcttcagcgtatatttgctgcccacgttgagccggctaacggaaaagcgcgatatcacccgggaagtggttaaaagcctgaaattcgtcttaccggcagtggcggcggcgagttttaccgtctggctgctgcgtgattttgctatctggctgctgttgagcaataaatttaccgctatgcgcgatctctttgcctggcagttagtgggtgatgtgttaaaagtgggcgcttatgtctttggttatctggtgatcgccaaagcgagtctgcggttttatattctggcggaagtcagccagttcactttattgatggtatttgcccactggctaatccctgcgcatggtgcactgggcgcggcgcaggcatatatggcaacttatatcgtctatttttctctttgttgtggcgtgtttttactctggcgtaggcgggcatgactgtactgattcacgtactgggaagcgatatccctcaccataaccgaaccgttttgcggtttttcaatgacgcgctggccgcgacgagcgagcacgcgcgcgagtttatggttgttggcaaggacgacggcttaagtgatagctgtccggcgctttctgtgcaatttttccctgggaaaaaaagcctggcggaagcggtcatcgcgaaagcaaaagctaaccgtcagcagcgttttttcttccacggtcagttcaatcccacactgtggctggctctgctgagtggtggcattaagcccagccagtttttctggcatatctggggggcagacctgtatgagctttccagtggcttgagatataagcttttttacccactacgtcgcctggcgcaaaagcgagtcggctgtgtatttgccacccgcggcgatttgagcttttttgccaaaacgcacccaaaggtgcggggcgaactgctgttcttcccgacgcggatggaccctagcctcaatacgatggcgaacgatcggcaacgtgaagggaaaatgaccattctggtggggaactccggcgaccgcagcaatgagcatattgctgccttgcgcgccgttcatcagcaatttggcgatacggtaaaagtggtggtgccgatgggatatccgcctaataacgaagcgtacattgaggaagttcgtcaggcggggctggagttattcagcgaagaaaatctacaaattctgagcgaaaaactggaatttgacgtctatctggcgctacttcgtcagtgcgatcttggttactttatttttgcccgccagcagggcattggtacgctgtgcttactgattcaggcgggcattccttgtgtgcttaaccgggaaaatccgttctggcaggatatgacggaacaacatttgccggtgctgtttactaccgacgatctcaacgaggatattgtgcgtgaagcgcagcgccagttggcgagcgtggataaaaacaccattgccttctttagccctaactatctacaaggctggcagcgggcgttggcgattgccgccagggaggtcgcatgagtctgctgcaattcagtggcctgtttgttgtctggctgctctgcacgctgtttattgccacgctgacctggtttgagtttcgccgtgtgcgctttaacttcaatgtcttctttagtttgctgtttttgctcacctttttcttcggcttcccgctgaccagcgtgctggtatttcgctttgatgttggtgtcgcgccgccagaaatcttgttgcaggcgttgctttctgcgggctgcttctacgcggtttactatgtcacctacaaaacccgcctacgcaaacgcgttgctgatgtaccgcgccgtccgctgtttaccatgaaccgcgtggagaccaatcttacgtgggtgatcctgatgggtatcgcgctggtaagcgtcggcatcttcttcatgcacaacggctttttgctgttccggcttaactcctacagtcagatcttttccagtgaagtctccggcgtggcgttaaaacgcttcttttactttttcatcccggcgatgctggtggtctactttctgcgccaggacagcaaagcgtggctgtttttcctcgtcagcacggtcgcctttggcttgctgacttatatgattgtcggcggcactcgcgccaatatcatcatcgcattcgctatcttcctgtttattggcattattcgcggctggattagcttgtggatgctggcggcggcgggcgtgctggggattgttggcatgttctggctggcactaaaacgctatggaatgaatgtgagcggcgatgaagcgttctatacgtttctctatctcactcgcgacaccttcagcccgtgggagaatctggcgttgctgttgcagaactacgacaacatcgacttccagggcctggctccaattgtccgcgatttctatgtctttatcccttcctggctgtggccgggtcgcccgagtatggtgctgaacagtgccaactactttacctgggaagtgctgaataaccactccggactggcgatcagccctacgcttataggcagtctggtggtgatgggcggcgcgttgttcatcccgctcggggcgatcgtggttggtctgatcatcaaatggttcgactggctgtatgagctgggcaaccgcgagcctaatcgctataaagctgcgatattgcacagtttctgctttggggcgatcttcaatatgatcgtgctggcgcgtgaagggctggatagctttgtcagtcgcgtggtcttttttatcgtggtcttcggcgcatgtctgatgatcgcaaaactgttgtactggctttttgaaagcgccggactcattcataaacgtacaaaaagtagcctccggacgcaggttgaaggataacaatgaataacaacaccacggcaccaacctatacgctgcgtggcttacagttgattggttggcgtgatatgcagcacgccctcgattatctgtttgctgacgggcagcttaagcagggaacgctggttgccattaatgctgaaaaaatgctgactattgaagataacgccgaggtcagggagttaattaacgctgccgaatttaaatatgcggatggcatcagcgttgtacgtagtgtacgtaaaaagtacccgcaggcgcaggtttcccgcgttgccggtgccgatctctgggaagagctgatggcgcgcgcaggcaaagaagggacgccggtatttcttgtgggcggtaaacctgaagtgctggcgcaaactgaagctaaactgcgcaaccagtggaatgtgaatatcgttggcagtcaggatggttattttaaacccgagcagcgtcaggcgctgtttgaacgcattcatgccagcggtgcgcaaatcgtcaccgttgcgatgggaagcccaaagcaggagatcatcatgcgcgactgccgtctggtacatccagatgcgctgtatatgggcgttggcgggacttacgatgttttcaccggtcacgtaaaacgcgcaccgaaaatctggcaaacgctggggctggagtggctctaccgcctgcttagccagccgagccgcattaagcgtcagcttcgtttgctgcgttatttacgctggcactacaccggcaacctatgattttcctctctttgtaaagcgacggagtggtcactccgtcgcctgtctgcttttttattacacaaagcattcaaatttttaatgctttatttgccatttctcctgaattacgaaaacatttgcaacactcgatgtacccataacgataaccggtaacaccggaaagcatgcaaacacaacacgaggatttatggcagataacaaaccagagctacagcgtgggctggaagctcgacatatcgaactcatcgccctggggggcaccattggcgtcggcctgtttatgggggccgccagtaccctgaaatgggccgggccatccgtattgttggcctatatcatcgccgggctgttcgtctttttcatcatgcgtagtatgggcgaaatgttgttcctcgaaccggttaccggtagcttcgccgtttatgcgcatcgttatatgagcccgttctttggctatctcaccgcctggtcttactggtttatgtggatggcggtggggatctctgaaatcaccgccattggcgtttatgtccagttctggttcccggagatggcgcagtggatacccgcattgatcgcagtggcgctggtggcgttggcgaatctggcggcggtgcggttgtacggcgaaatcgagttctggttcgcgatgatcaaagtcaccacgattatcgtgatgattgtcattggcctgggcgtgattttctttggctttggcaatggcgggcagagcattggttttagcaatctcacagagcatggcggtttctttgcgggtggctggaaagggttcctgaccgctctgtgtattgtggtggcgtcctaccagggcgtggagctgattggcattactgccggtgaagcgaagaatccgcaggtgacgctgcgcagtgccgtaggcaaggtgctgtggcggatcctgattttctacgtaggcgcgattttcgttatcgtcaccatcttcccgtggaatgaaataggcagcaacggcagcccgttcgtactgacttttgccaaaatcggtattaccgcagcggcgggcattatcaactttgtggtgctgacggctgcgctctctggctgtaacagcggcatgtacagttgcggacgtatgctctacgcactggcgaaaaaccgtcagttaccggcggcaatggcgaaagtttcccgtcacggcgtaccggttgcgggtgtggcagtatctattgctattctgctaattggcagttgcctgaactacatcattcccaatccgcagcgtgtgtttgtctacgtctacagtgccagcgtgcttccggggatggtgccatggtttgtgatattgataagccagctgcgttttcggcgtgcacataaagcggcgattgccagccatccgttccgcagtatcctgttcccgtgggccaattacgtaacaatggcattcctgatttgcgttttgatcggcatgtactttaatgaagatacgcgtatgagcctgtttgttggcatcatctttatgctggcggtgacggcgatttataaagtttttggccttaatcgccacgggaaagcgcataaactggaggaataagcagcaaaacgcacaaaccgtaaccaaacgcgcaatttatttaaaaagggactagacagaggggtgggaagtccgtattatccacccccgcaacggcgctaagcgcccgtagctcagctggatagagcgctgccctccggaggcagaggtctcaggttcgaatcctgtcgggcgcgccatttagtcccggcgcttgagctgcggtggtagtaataccgcgtaacaagatttgtagtggtggctatagctcagttggtagagccctggattgtgattccagttgtcgtgggttcgaatcccattagccaccccattattagaagttgtgacaatgcgaaggtggcggaattggtagacgcgctagcttcaggtgttagtgtccttacggacgtgggggttcaagtccccccccctcgcaccacgactttaaagaattgaactaaaaattcaaaaagcagtatttcggcgagtagcgcagcttggtagcgcaactggtttgggaccagtgggtcggaggttcgaatcctctctcgccgaccaattttgaaccccgcttcggcggggttttttgttttctgtgcatttcgtcaccctcccttcgcaataaacgcccgtaataactcattgccccacggtatgatttcgcccttaacgtattgaaggatgacttcaggcaaggagcgaccatgctgcaacaggttccaacgcgtgcttttcatgtgatggcgaaaccgagcggttccgattgtaatctgaactgtgactactgtttttatctcgaaaaacaatccctttaccgcgaaaagccagtcacgcatatggacgatgacacgctggaagcgtatgtccgtcactatatcgctgccagcgaaccgcaaaacgaagtggcttttacctggcagggcggcgaaccaacgctactcgggctggcgttttaccgccgtgccgtagcgctacaggcgaaatatggtgctggcaggaagataagtaacagcttccagactaacggcgtgctgctggatgacgaatggtgcgcgtttctcgcggagcatcattttcttgttggtttaagcctggatggcccgcctgagatccacaatcaatatcgcgtgactaaaggtggcagacccacgcataagctggtgatgcgtgccctgacgctcctgcaaaaacatcatgtcgactataacgtgctggtctgcgttaatcgcaccagcgcgcagcaaccgttgcaggtatatgattttttgtgcgatgcgggagtcgaattcatccagtttattccggtggtcgagcgcctggctgatgaaacaactgcccgcgatggacttaagttacatgcgcctggtgatattcagggtgagctaacggaatggagcgtgcgccccgaggagttcggtgagtttctggtggcgatattcgaccactggatcaaacgcgacgtcggcaagattttcgtgatgaatatcgaatgggcgtttgccaattttgtcggtgcgccgggtgcggtttgccatcatcagccaacctgtgggcgcagcgtgattgttgagcacaacggcgacgtttacgcctgtgatcactatgtttatccgcaatatcggctggggaatatgcaccagcaaacaattgcagaaatgatcgattccccgcaacagcaggcgtttggtgaagataaatttaagcagttaccggcgcagtgtcgcagttgtaacgtgttaaaagcgtgctggggaggctgcccgaaacaccgcttcatgctcgatgccagcggcaaaccgggactgaattatttgtgtgccgggtatcagcgttatttccgccatctaccgccatatcttaaagcaatggctgatttgctggcgcacggtcgcccggccagcgacattatgcatgcgcatttgctggtggtgagtaagtaaaaatcggcggccgcctgcggttgattgccggatgcggcgtaaacgccttatccggcctacatgatcgtgcaaattcaataaattgcagcgttctgtaggctggataagatgcgtcagcatcgcatccggcaaaggcagatctcagcgatagcgccggcttagtcagatttaatctgcgcgcgtggtggatattttttcaggatctccatatacgcgtgcatttcggtctgtagcggtacacccatcggaatatggcgcacgccgatggagtcgctttcctgcggatcggtgtagaggttaaacacgctgcttcccgccgtttgcattactgtgccggtgaatccaccctgatatccgctctgggtataagcgtaaggttgctgaatcaggacgtgatacttgaactcatccatacgcacagcagcgagtttaccgttgaggaagtagtgctcggccttacggttagactgaccatttgttcccaggaagaaggatgtctggtccacaccatcgataaaggtggttttcggcactaaattcgccactttcgctccaggatgccctgccagatccagcgcggtagggaagagatctgccagatcgacaataccgtcagatttacgcggttggatcatccctttccagtaaacgaaagtcggtacgcgaacgccgccttcccaggtgctacctttcgcaccacggaacggggtgcgtccgtgcggcggtacttcggcttccggtccgttatcggaggtaaagacgatcagcgtgttatcaagctgaccgtttttctccagtgttttatacagattagcgaacacatcgttcatctccaccatgcagtcgccatagctggtgcgtgccggagagctacccgcatatttcgcatttgggtagttatcgaagtggcagccacgagtgccgtagtagaggaagaatggtttatcgctcttcgccatcttgtcgaggaacttaacgccatagtccatccagcgttgatccagatcttccatatatttcggcgtaatgtcggcaatggcctgttgttcgccgccgcgcaccgcatgaacgtcatctttgctgaacggtaattgcttgatgtattcagaacggtccggactcagggccacttccggattgacgtgaacgtcgcgccattcggtgtacatatcagacacgctgttaaagccacggaaatcatcaaagccaacgttctgcggctggctctctttgttttcccccatatgccattttccgatggcctgagtgacgtagccctgatcgtgcagcaactgcggcagcgtggttaacccttgcagcccgcccggttgcccgtacattggcggcatcagaatgccgtggtggatggagtattgtccggtgagaatggtggcgcgggttggggaagagcttggttgagaatacgcgctagttaaaatcagcccctggctggcaacggcgtcgatatctggtgtagggttacccaccgccacgccgccaccgttaaaaccgacgtccatccagcccacatcgtccagcaagaaaacaaccacattcggtttcttaccggtttttttctcaagttctgccagcttctgctgggtttctttatcctgcgccggatgctgcattactggcatcatattgtcggcaatagtggtcgccggtttaaccagatactggtttgggtgatcgtatccggcaaagcctttgcgtgcggtggcagtactcggggtatctgctgcgctggccatgagaggaagagcggcggcgacagcaacaacaagacgtttgggactaaagctaaattccatgcaaaatgctccggtttcatgtcatcaaaatgatgacgtaattaagcattgataattgagatccctctccctgacaggatgattacataaataatagtgacaaaaataaattatttatttatccagaaaatgaattggaaaatcaggagagcgttttcaatcctacctctggcgcagttgatatgtaaggcaggtttattatatcgcgttgattattgatgctgtttttagttttaacggcaattaatatatgtgttattaattgaatgaattttatcattcataataagtatgtgtaggatcaagctcaggttaaatattcactcaggaagttattactcaggaagcaaagaggattacagaattatctcataacaagtgttaagggatgttatttcccgattctctgtggcataataaacgagtagatgctcattccatctcttatgttcgccttagtgcctcataaactccggaatgacgcagagccgtttacggtgcttatcgtccactgacagatgtcgcttatgcctcatcagacaccatggacacaacgttgagtgaagcacccacttgttgtcatacagacctgttttaacgcctgctccgtaataagagcaggcgtttttttatgtatcaggaaggccccggaggtgcttgcctccgggtgagaaggaattactgtggcgggttattctgcaacgttaacatcaaaccgtcgcgacgcatagctgcagcttcttccggcttgtgcagtctgtccagcgcgtcggcaagccatgcgtaatcgtaggcgtccggacgttgtttcagcgctgcgcggaaggcgaggcttgcttcctgccattctccgtgcttcatcagactctggcccagtgtgctccacaacagcgggcgatcgccgacgtttttgatttgctggcgcagcactttttccagctgttccggattgtttgttttcagtcgaggaatcggcagcagtaggcgatcgtcgtactggcgtttcaggccatcgatgataatttgctgggcagtatcatgatcgtcacattcaataagatgttccgccattgccacctgcaacgctacctgatgacgcgttttccggctttggtttttccaccagttacgcaaaccttcgctaccgttatcggcacgcgcctgatccatcaggccaatccatgcctgttgttccagcattgcacgatgttcttcatcaccaacatgggctttcgccatacttgggataatatccagcaggctactccatgcacctgtgcggatatacgcctgttccgccagacgtaatacttccggatggcgtggcgtaacttccagcagcttatccacgccgtggcgtgcagcatggttttcattacgggccagttgcagacgtacgcgggtgatttctaccggaatggtgtcgttgccggccagctccgctgcgcgttccagatgttggttggcgcgtgcttcatcaccacgttgttgcgcggcttcggcagccagtagatagttcaccaccggttgttccgcgtgatcggcatttttcgccatcagcttttcaacttgctgataatcgccttccgccagtttcagcagcgcctgttcggtctgcttacgtgcacggcgacgcttacgtccgacaaaccacccacgggtgtgcgcgccagtgcggaagatccgccgcagtagccactcaatggcaaacagcactaccatcgccagaatcaatatgatcgccaggcccgtgacgctggtttcgatattgtagttgtcggtctggatcagcacataaccctgatggccggcaatcatcgggccaaccacgatccccgcaatcagcaacacaaagagcaataacacttttagcatggttattctccttgcggcgcggctgccggagtatcagcttgcggtgcaggtgcaggtttagcttccgttgtccccgctgccggttgtgccagcaggttacgcacgcgagtctgcatcagtttttccagcatcgcctggctttgcagggtttccggaagatccatgctgatattttgctggcttaactggtccacctcgtcgaggaacgctttggtggtggcatcatcagtatcgtagtaagcacgtacccaggtggagacgttctccagcgcctggcgataagtctcttcctggtgacgcggtacagcttgtgctgcgaccagcaggcgagagcgaatattttcgcgcagatagatatcctgatttggcgctaacagcggtacggcggtgtcatcacgacggcgaatcgtaatgaagttgtccataaagttctgccagcttttttgcagattgatacgccattcgctgatggaactggaaagctcttcaccgtcactatccatcgggctaccatcgctgtcattatcggccagacgcaggttatctacctgattactaagctgattaagcttaaggatgatgccgtcataatccacctggcttactgcagaaaggctggcgatatcatcggtaattgcccgacgaacggtaatcagactcgggtcattcatatccgccaggctggcgtctgcacttttcagcaacgctgcagcggtcgtgacgtcctgatcgctccacagcttccgtccggcgagtttcaccagaaaatcggcctgagccagcagccaggttttagcatcgctgccggaaatggtggcgaccttttgttggacttcatccaactgttttgccagcgtttcttgctgacgattcgcctgcttaagttgtgcagcttgttgcttaataatgccttccagctcggctttttggctctcctgggctttttgcaatgccgtcagttggttagccagggcatcgctggtggcggtctgattgacggcctgttgtttaccccagccatacaaaccgatgcccgccgccagagcaatagcgatagccaccgcgctgagaatcaatgcggtattgttcttactctttttttctgttgcgacaggttgactcgtggtgtccacggcctccctggtctcttcaaccacggcggaggttttttcttgttccgtcattatggcttcctgttatgagagttattgtaatgcccgtaaaagcgcatcgttgtcagcgttatcggcgaccttaatgtcttgccagcccagttcccgggcgagtttcgccaaacgctcactgacgaccaatagtcgacagtgtagtaaccagtgctcacgataccattgtgggatcaggctccagagttgctgcaacatttcaccgctggtaacaacgaccatcgtcacctcgcgggcttgccagcgcatcgcttcttctgcaccatcgtaatggattgcgcatcgttgataacattcacaaaaagtgacctcagcaccgcgcgccgtcagggtatccccaattagctcacgaccaccattgccacgtaatatcagcgcacgtttgcccgcaatattttgtaattcaggtaattgtagcaagacttcgctgatttcccgatcctgcgggtagagaatcttctgtccacttacggtatgtagtgccagtgcggtggtgcgtccaatggcgaaataatcaggtagtcggggccatttacgatcttgctgatgcagctgactttgggcaaaagcaaccgcgtgttggctgagggcaaacaacagatcgctctcccccagcgctgccagttgatcagcaagttgcggtaattgttgacccggagaaaactcaatcagcggaaaatgccaggccacctgccccagtgtgcgcagacggctcactaactcttctccagcgggagacgggcgggtgacaaggatactcatgccggggcgtctccgttatagacttcagcgaggatctcgcgcgcgccgttattcagtagctcttctgccaggctaatccccatttgttcggcatcttgcggcgcaccgcggcgttcaccgcgaataatctggctaccgtccggcgcgccgaccagcgcacgcagccagatttcgccatcaataagctcggcgtagctaccaattggcacctgacatccgccttcgagacgggtattcatggcgcgttctgcggtaacgcgcagtgcagtttcgtggtgattcagcgcggcaagcagctcgcgagtgcgactatcatcaaggcggcattcaatacccaccgcaccttgtcctaccgccggaagagaaatctcgggtggcaacgcggcgcgaatacgactctccagacctaaacgttttagtccggctacggcaagaatgatggcatcgtattcgccgttatccagtttgctcaggcgagtgccgacgttgccgcgcagggagcggataatcagatccggacggcgttcagccagttggcactggcgacgtaaactggacgtcccgacgatactgcctgccggtaacgcatccagactgtcatagttattggacacaaaggcatcgcgaggatcttcacgctcacaaatagtgaccagtcccagaccttgcgggaattcaaccggcacatctttcatactgtgtacggcgatatcggcgcgattttcgaggagcgcgacttccagctcttttacaaataagccttttccgcctactttcgccagcggcgtatcaagaatcacatcgccgcgcgtcaccatcggtaccagttcaacgaccaggcccggatggctcgccatcaacttgtctttgacatagtgtgcctgccagagtgcaagtgggctttggcgtgtggcaattcttaaaacattgtctaacatgcttgttaccgtcattatcatccgtggtccatcctaacatccttgccagagtgatgtcagtgttgtggtgaaacgtagacgcctgcgcaaaccgtaaaatgaggtctggcagtggatcctgacaggcgtttcacgccgttgtaataaggaatttacagagaataaacggtgctacacttgtatgtagcgcatctttctttacggtcaatcagcaaggtgttaaattgatcacgttttagaccattttttcgtcgtgaaactaaaaaaaccaggcgcgaaaagtggtaacggttacctttgacatacgaaatatcccgaatgccgcgtgttaccgttgatgttggcggaatcacagtcatgacgggtagcaaatcaggcgatacgtcttgtacctctatattgagactctgaaacagagactggatgccataaatcaattgcgtgtggatcgcgcgcttgctgctatggggcctgcattccaacaggtctacagtctactgccgacattgttgcactatcaccatccgctaatgccgggttaccttgatggtaacgttcccaaaggcatttgcctttacacgcctgatgaaactcaacgccactacctgaacgagcttgaactgtatcgtggaatgagtgtacaggatccgccgaaaggtgagcttccaattactggtgtatacaccatgggcagcaccagctccgtagggcaaagttgttcctctgacctggatatctgggtctgtcatcaatcctggctcgatagcgaagagcgccaattgctacaacgtaaatgtagcctgctggaaaactgggccgccagcctgggtgtggaagtcagcttcttcctgattgatgaaaaccgcttccgtcataatgaaagcggcagcctggggggcgaagattgtggctccacccagcatatactgctgcttgacgaattttatcgtaccgccgtgcgtctcgccggtaagcgtattctgtggaatatggtgccgtgcgacgaagaagagcattacgacgactatgtgatgacgctttacgcgcagggcgtgctgacgccaaatgaatggctggatctcggtggcttaagcagcctttctgctgaagagtactttggtgccagcctttggcagctctacaagagtatcgattccccatacaaagcggtactgaaaacactgctgctggaagcctattcctgggaatacccgaacccacgtctgctggcgaaagatatcaaacagcgtttgcacgacggcgagattgtaagctttggtctcgatccatactgcatgatgctggagcgtgttactgaatacctgacggcgattgaagattttacccgtctggatttagtacgtcgctgcttctatttaaaagtgtgcgaaaagctcagccgtgaacgcgcctgcgtaggctggcgtcgcgcagtgttgagccagttagtgagcgagtggggttgggacgaagctcgtctggcaatgctcgataaccgcgctaactggaagattgatcaggtgcgtgaggcgcacaacgagttgctcgacgcgatgatgcagagctaccgtaatctgatccgctttgcgcgtcgcaataaccttagcgtctccgccagtccgcaggatatcggcgtgctgacgcgtaagctgtatgccgcgtttgaagcattaccaggtaaagtgacgctggtaaacccgcagattagtcccgatctcagcgaaccgaatctgacctttatttatgtgccgccgggccgggctaaccgtagtggttggtatctgtataaccgcgcgccaaatattgagagcatcatcagccatcagccgctggaatataaccgttacctgaataaactggtggcgtgggcatggtttaacggcctgctgaccagccgcacccgtttgtatattaaaggtaacggcattgtcgatttgcctaagttgcaggagatggtcgccgacgtgagccaccatttcccgctgcgcttacctgcaccgacaccgaaggcgctctacagcccgtgtgagatccgccatctggcgattatcgttaacctggaatatgacccgacagcggcgttccgcaatcaggtggtgcatttcgatttccgtaagctggatgtcttcagctttggcgagaatcaaaattgcctggtaggtagcgttgacctgctgtaccgcaacagctggaacgaagtgcgtacgctgcacttcaacggcgagcaaagcatgatcgaagccctgaaaactattctcggcaaaatgcatcaggacgccgcaccgccagatagcgtggaagtcttctgttatagccagcatctgcgcggcttaattcgtactcgcgtgcagcaactggtttctgagtgtattgaattgcgtctttccagcacccgccaggaaaccgggcgtttcaaggcgctgcgcgtttctggtcaaacctgggggttgttcttcgaacgcctgaatgtaagcgtacagaaactggaaaacgccatcgagttttatggcgcgattagccataacaaactgcacggcctgagtgtgcaggttgaaaccaatcacgtcaaattaccggcggtggtggacggctttgccagcgaagggatcatccagttctttttcgaagaaacgcaagacgagaatggctttaatatctacattctcgacgaaagcaaccgggttgaggtatatcaccactgcgaaggcagcaaagaggagctggtacgtgacgtcagtcgcttctacagcagtagccatgaccgttttacctacggcagtagcttcatcaacttcaacctgccgcagttctatcagattgtgaaggttgatggtcgtgaacaggtgattccgttccgcacaaaatctatcggtaacatgccgcctgccaatcaggatcacgatacgccgctattacagcaatattttagctgatgaacgtgccggaaagcgaggcttatccggcatgcaatcttagcggaaactgactgtttcacccgcctgctgcgtcgccgcctgttccagcaaatcccagaaggtttcgccgctgcgatcacaaatccactcatcgcctttcaggtcaaaatggtagccgccctgtttggttgccagccatacctggtgcagcggctcctggcggttgataatgattttgctgccattctcaaaggtaatggtcagtacgccgccgttgatttcgcagtcgatatcgctgtcgccatcccagtcgtccaggcgttcttcaatggtcagccagagttgatcagccaggcgatgaaattcactgtcgttcattgttgtatcctgtttttaagtgatggcggcagtatagcggcatggggtcagggcttcaaagtttgcacctctgcggctgcgttccggcacgatagttccgtcaccggaataatgatgtctctgtgtagcgaaagatttgtctctagtttagggcgcagttacaccacgtctttccctgtttctggtaaacattatgatcaggtttaccgagcgagcatcctcacgctgacggaactaaaaaagacaacaaacaaaccacattgcgatagtgcataaagccatcctggcgcgaggtgccgatcacgaaactaccagcaaaacataaatccccacgagtaagcgttatactcgcagcatttcctcacttttcagacttcataaagagtcgctaaacgcttgcttttacgtcttctcctgcgatgatagaaagcagaaagcgatgaactttacaggcaatccataatgaaaaacgtgtttaaggcactcactgtattacttactctcttcagcctgacgggctgcggtctgaaaggtccgctctatttcccgcctgcagataaaaacgcaccgccgccgaccaaaccggtagagacgcaaacgcaatccacggtgccggataaaaacgatcgcgccactggcgatggtccatcccaggtgaattactaaaagtcagtttctgtacccgcgtgattggagtaaatgatgcagttcagcaaaatgcatggccttggcaacgattttatggtcgtcgacgcggtaacgcagaatgtcttttttagtccggagctgattcgtcgcctggctgatcggcacctgggggtagggtttgaccaactgctggtggttgagccgccgtatgatcctgaactggattttcactatcgcattttcaatgctgatggcagtgaagtggcgcagtgcggcaacggtgcgcgctgctttgcccgttttgtgcgtctgaaaggactgaccaataagcgtgatatccgcgtcagcaccgccaacgggcggatggttctgaccgtcaccgatgatgatctggtccgcgtaaatatgggcgaacccaacttcgaaccttccgccgtgccgtttcgcgctaacaaagcggaaaagacctatattatgcgcgccgccgagcagacaatcttatgcggcgtggtgagcatgggaaatccgcattgcgtgattcaggtcgatgatgtcgataccgcggcggtagaaacgcttggtcctgttctggaaagccacgagcgttttccggagcgcgccaatatcggttttatgcaagtggttaagcgcgagcatattcgtttacgcgtttatgagcgtggggcaggagaaacccaggcctgcggcagcggcgcgtgtgcggcggttgcagtagggattcagcaaggtttgctggccgaagaagtacgcgtggaactccccggcggtcgtcttgatatcgcctggaaaggtccgggtcacccgttatatatgactggcccggcggtacatgtctacgacggatttattcatctatgaagcaaccaggggaagaactgcaggaaacactcacggagcttgatgaccgggcggttgtcgattatctgattaaaaatcctgagttttttatccgtaatgcgcgcgcagtagaagcgatacgtgtgccgcatccggtacgcggcaccgttagcttggtcgagtggcacatggcccgcgcacgtaatcatattcatgttctggaagagaacatggcgctgttgatggaacaggctatcgccaacgaaggcctgttttatcgcctactctacctgcagcgcagtctcaccgccgccagcagtctcgacgatatgctgatgcgctttcaccgctgggcgcgcgatctcggcctggcaggtgcgagtctgcgcctgtttccggatcgctggcgcttaggtgcgccgagcaaccacactcatctggcattaagccgtcagtctttcgaaccgctgcgtattcagcgtttggggcaggaacagcactatcttgggccgcttaacggaccagagctgctggtggtgctaccggaagcgaaagcggtgggaagcgtggcgatgagcatgctgggaagcgatgctgatttgggtgtcgtgctgtttaccagtcgcgatgccagtcactatcaacaagggcaaggaacgcagttacttcatgaaattgcgctgatgttgccggagcttctggagcgttggattgaacgcgtatgaccgatttacacaccgatgtagaacgctacctacgttatctgagcgtggagcgccagcttagcccgataaccctgcttaactaccagcgtcagcttgaggcgatcatcaattttgccagcgaaaacggcctgcaaagctggcagcaatgtgatgtgacgatggtgcgcaattttgctgtacgcagtcgccgtaaagggctgggagcagcaagtctggcgttacggctttctgcgctacgtagcttttttgactggctggtcagccagaacgaactcaaagctaacccggcgaaaggtgttagcgcaccgaaagcgccgcgtcatctgccgaaaaacatcgacgtcgacgatatgaatcggctgctggatattgatatcaatgatcccctcgctgtacgcgaccgtgcaatgctggaagtgatgtacggcgcgggtctgcgtctttctgagctggtggggctggatattaaacacctcgacctggagtctggtgaagtgtgggttatggggaaaggcagcaaagagcgccgcctgccgattggtcgcaacgctgtggcgtggattgagcactggcttgatttgcgcgacctgtttggtagcgaagacgacgcgctttttctgagcaaactgggcaagcgtatctccgcgcgtaatgtgcagaaacgctttgccgaatggggcataaaacaagggctgaataatcacgttcatccgcataaattacgtcacagcttcgccacgcatatgctggagagcagcggcgatcttcgtggtgtgcaggagctgctgggtcatgccaacctctccaccacgcaaatctatactcatcttgattttcaacaccttgccagcgtgtacgatgcggcgcatccacgcgccaaacgggggaaataatgcgtttttaccggcctttggggcgcatcagcgcgctcacctttgacctggatgataccctttacgataaccgtccggtgattttgcgcaccgagcgagaggcgcttacctttgtgcaaaattatcatccggcgctgcgcagcttccagaatgaagatctgcaacgcctgcgccaggcggtacgggaagcggaacccgagatttatcacgacgtgacgcgctggcgttttcgtagcattgaacaagcgatgctcgacgccgggctgagtgccgaagaagccagtgcaggcgcacacgcagcaatgatcaactttgccaaatggcgcagccgaatcgacgtcccgcagcaaactcacgacaccttaaaacagctggcgaagaaatggccgctggtggcgatcaccaacggtaacgcccagccggagctgtttggtttgggggattattttgagtttgtgctgcgcgctggcccgcacgggcgcagtaaaccgttcagcgatatgtactttttggctgcggaaaaactcaacgtgccgatcggcgagatcttacatgttggggacgatctcaccactgacgtgggtggggcaattcgcagcggaatgcaggcttgttggatcagaccggaaaatggcgatctgatgcaaacctgggacagccgtttactgccgcatctggaaatttcccggttggcatctctgaccagcctgatataatcagcaaatctgtatatatacccagctttttggcggagggcgttgcgcttctccgcccaacctatttttacgcggcggtgccaatggacgtttcttacctgctcgacagccttaatgacaaacagcgcgaagcggtggccgcgccacgcagcaaccttctggtgctggcgggcgcgggcagtggtaagacgcgcgtactggtgcatcgtatcgcctggttgatgagcgtggaaaactgcagcccatacagcattatggcggtgacgtttaccaacaaagcggcggcggagatgcgtcatcgtatcgggcaactgatgggcacgagccagggcggtatgtgggtcggcaccttccacgggctggcgcaccgtttgctgcgtgcgcaccatatggacgccaatctgccgcaggatttccagatcctcgacagtgaagaccagctacgcctgcttaagcgtctgatcaaagccatgaacctcgacgagaagcagtggccgccgcggcaggcaatgtggtacatcaacagccagaaagatgaaggcctgcgtccgcatcatattcaaagctacggtaatccggtggagcagacctggcagaaggtgtatcaggcgtatcaggaagcgtgtgaccgcgcgggcctggtggacttcgccgagctgctgctgcgcgctcacgagttgtggcttaacaagccgcatatcctgcaacactaccgcgaacgttttaccaatatcctggtggacgaattccaggataccaacaacattcagtacgcgtggatccgcctgctggcgggcgacaccggcaaagtgatgatcgtcggtgatgacgaccagagtatctacggctggcgcggggcgcaggtggagaatattcagcgtttccttaatgatttccccggtgccgaaactattcgtctggagcaaaactaccgctctaccagcaatattctgagcgccgctaacgccctgattgaaaacaataacgggcgtctgggtaaaaaactgtggaccgatggcgcggacggtgagcctatttccctctattgcgcttttaacgaactcgatgaagcgcgttttgtggttaaccgcatcaaaacctggcaggacaacggcggagcgcttgccgagtgcgccattctctaccgcagcaacgcccagagccgggtgctcgaagaggcgttattgcaggccagtatgccgtaccgtatttacggcgggatgcgcttcttcgaacgccaggaaatcaaagatgcgctcagctatctgcgcctgattgccaaccgcaacgacgacgcggcctttgagcgtgtggtgaatacgccaacgcggggtattggtgaccggacgctggacgtggtacgtcagacaagccgcgatcgccagttaacactctggcaggcatgtcgtgagctgttgcaggaaaaagccctcgccgggcgagctgccagcgccttgcagcgatttatggaattaatcgacgccttagcgcaggaaactgccgatatgccgctgcatgtacagactgaccgggtaattaaagactccggcctgcgtaccatgtatgagcaggagaagggcgaaaaaggtcagacgcgtatcgaaaacttagaggaactggtgacggcaacgcgccagttcagctacaacgaagaagacgaagatttaatgccgctgcaggcgttcctctcccatgcggcactggaagcaggtgaagggcaggcggatacctggcaggatgcggtgcagttgatgacgctacacagcgcgaaaggcctggagttcccgcaggtgtttatcgttggtatggaagagggcatgttcccaagccagatgagcctggatgaaggcgggcgtctggaagaagaacgccgtctggcctacgttggcgtaacccgcgcgatgcagaaactgacgctgacctacgcggaaacccgccgtctgtatggtaaagaggtttaccatcgcccgagccgctttatcggcgagctgccggaagagtgtgtggaagaggtgcgcctgcgcgccacggtaagccgcccggtcagccatcagcggatgggtacgccgatggtcgagaacgacagcggctacaagctcggccagcgcgtacgccacgctaagtttggtgaaggcaccattgtcaatatggaaggcagcggtgagcatagccgtttgcaggtggcatttcagggccagggtattaaatggctggtggcggcatacgcccggctggagagcgtgtaacgttgccggatgcggtgctgcgcaccttatttggcctaaaaaatcattcagattcaataaattgcaacgtcatgtaggccggatagggcgtttacgccgcatccggcatctgcgccatcttcagtatctgacacaaaactatcgttttaacctttccgctcgacggaaatcatggtgacaaaaggatagcgttgccacgggattgccccgcctttcatatacatatgactaatcgtgccatcaagataaagcagctgctcaacgttcagtttcgctttggcataacaggcaaaatcataaaaatttgttgcctgctggctcaacaaaaacacggcgttcccatgtttattaatcccaacaccgttacgaattttgctactggcgacgttgggatgaatacgcggattaattacaccgttttccatcaacattggcccactctgcaccgcaaactgaatctctttactggttttgaaggcatccagacgaacgatgccgactttatctcccgcgacataaaacacgccgccaggacggataaagaaattcccttcaccactagcgagatttaacgccaccttctgctgaccgttttcgatgtacaaaccgagcggcgcatagctttcatcatagatgccgccgttcatcgccatctgcacctgaccctgactattaatatccgccagcagagcatgtaacgttccccacgcttcgccattggctttttgccagtacattttcacccgctctgtttgaggattaacggtatacgcctgtacggtcagcgtcggatcactgagtgcgcaatcatcagcggcaacagcaaacaagggaggtaaggtgagggcgagaaaaatccgtttgagattcaaggtgatcattcctttaccaatgagtagctgatgcgccattataggtcctggatgtgggatttttttatcctgttagcgaccttgacgagtaccaaaaagcgcgaagttcaactattgttctgtggtgttctgttgcgtgttgacggcaaaattttgctggcgtaacatgcgcgcacgatcactctaagaggacattcgccttggacacacccagtagatactggctcactatcctgtcatccaggatcaactcctaaggctatccctttttgctgatagccttagcggttgtcagcgacctcaatttttcccgtcgcgctgagtcaggctgtttaatggtctgaaacccaatttgtttctgtgtgcccaccgaactgtccgatattttaagcattgggagtcccggtcatgctgagcgcatttcaactggaaaataaccgactgacccggctggaagtcgaagagagtcaaccccttgtaaatgcagtatggattgatcttgtcgaaccggacgacgacgagcgactgcgcgtacaatctgaacttggccagagcctggcaacccgcccggaactggaagacatcgaagcaagcgcacgtttctttgaagacgacgacggcctgcatattcactccttcttcttctttgaagatgcggaagatcacgccggtaactccactgtggcatttaccatccgtgatggtcgtctgtttactctgcgtgagcgtgaactgcccgcttttcgtctgtatcgtatgcgtgcccgtagccagagcatggtagacggtaacgcctacgagttgctgctggatctgttcgaaaccaaaatcgaacagttggcagatgaaattgaaaatatctatagcgacctggagcagttgagccgggtgattatggaagggcatcagggcgatgagtacgacgaggcgctctccactctggcggaactggaagatatcggctggaaagttcgcctgtgtctgatggatacccagcgcgcgctcaacttcctggtgcgtaaagcgcgtttaccgggtgggcaactggagcaggcgcgtgaaatcctgcgagatatcgaatccctgctgccgcataacgaatccctgttccagaaggtgaacttcctgatgcaggcggcaatgggttttatcaacatcgagcagaaccgcatcatcaaaatcttcagcgtggtatccgtggtattcctgccgccgacgctcgttgcttccagctatggcatgaactttgagtttatgccagaactgaagtggagcttcggctaccctggcgcgattatctttatgatcctcgcgggcctggcaccgtatctgtactttaagcggaagaactggttgtaaaaaacgagagcggtggcttagtctggctaagccacctgttattcaaaggctccaggtatttaacccttttacctctttctcatagaaccatttgttcgtgttaacagcaacataggctgctacggcaattcccagaatgttaacgccaattagtgcaccaacaaatagagatagaataccaagtaatagaactataattgcttttttccataaccccaggacaaataaatatatccaggaacagaagaaagcaatgaaattcatttgaatagttaagcgttgtcttacttttaatgctttaaatgctgctttatattctggtgttgccccccagaatccaggaaaaccatgttgatcataaaaattaaatcggtatttccatttttcacttaaactaccatcgttcatatattccttactcataaatactccataattattgtttactactatcagtaggtgcaagcattagcatactgaaagtggaaaaataacaaatcaaaaaaatcatgctaccattgccactacaggcaaaatcttcggctatcattgtgatgatagagatgatatatactgctaatgtaccaaaaacataagtttttatatagatgaaaccactatcacggagtcgctggcaattcatgttgatgacgagataatggagtacgatggtagagactataacaagaaagcctgcttctccatcgttaaaaaagataataagaaaggcaaaaatgaaatttattaaaataaaactaaatatataacgacgtctggaaatcttaccgttagatgttgggataaatatacgtaacataaattttacatccttgtatgagtctccggtcagcatggcaatatgcccactctcatgcaagagtcggcatattttttcagaatatatttattttttatttggacgttctacgctgcgtataaatcgcatccatcacaaaaattgccagcgccacccaaataaaggcgaaagtcaccatcttatcggcacccggtttttcaccataaaacgtcacagccagcaggaacatcagcgtcgggccaatgtactggaaaaagcctaacgtactgagacgcaagcgcgtggcagcggcggtaaaacacaacagcggtacggtagtgacaataccggcggcgatcagcagtaaattcaggctcatcgggttttgccccatatggctggtactgctgtcggcaatagcaaacaggtaaattgccgccacgggcagcagccacatggtttcgattaacatgccggtttgcgcttcaacggcaatcttcttgcgtaccagaccgtagaaggcaaaactaaatgccagtcccagcgcgataataggtaggctaccaaaagtccacagctggactaacacgccacatatcgccagaatcaccgccagccattgcatccggcggaatcgctcgccgaggaaaatcatccccagcacaatgttcaccagcgggttaataaagtaaccaaggctcgcttccagcatatggtgattgttcaccgcccagataaacagtagccagttgccaccaatcagcacggcagagactgccagcataaaaattttctgtggcgtctgaatcagcgtttttaaataggaccactggcggcaaatgctcatcagcaccaccataaagaaaaagctccagatcacgcgatgcgtcaggatttcatcggcgggcacgtagtaaatcaacttgaagtacgctggcgctataccccaaataaaataagcggcaagagcgagtaatacgccctgccgcgtttgttttgcatccatcgggaatactcatttttaattggtaacagcagtttacctgcttttatgtcttcaacctaccatataggtggcggtggcactggcaatataaagctgttcttcattgtgtaattcaacgcgggcgacggcgactttattgcctgcacgcaacaggctactagtagcagtaaaacgctcgcccctgcctgggcgcagataatcaacgcgaagatcaatggtccccatccggcttagccgctggcgtagttcatcttcactgatggtttcgtggcgggttaaggtacttcccacgcacaccagaccggcggcgacatccagcgcgctcgcaatgaccccgccgtgcaaaatgctttgcgcccagttgcccaccatcattggctgatttttaaaggccagctgtgcgaactctttttcgtaacgctccagttccatccccaatgcgcggttaaatggcatgtgataaacaaacatctcacccactaatttcagggcttgttcagcggtcagtacggcagacatatcatccttacacttcattggttaatgaaatgttgattttatgcttctttgttgttggtttctactttaggaagggataactaacggctatggagttaagtatgtaaaatagcccgcagaaaaatattcaccttatcaataattcgttacggagaacacgaccgatgcggactctgcagggctggttgttgccggtgtttatgttgcctatggcagtatatgcacaagaggcaacggtgaaagaggtgcatgacgcgccagcggtgcgtggcagtattatcgccaatatgctgcaggagcatgacaatccgttcacgctctatccttatgacaccaactacctcatttacacccaaaccagcgatctgaataaagaagcgattgccagttacgactgggcggaaaatgcgcgtaaggatgaagtaaagtttcagttgagcctggcatttccgctgtggcgtgggattttaggcccgaacagcgtgttgggtgcgtcttatacgcaaaaatcctggtggcaactgtccaatagcgaagagtctagtccgtttcgtgaaaccaactacgaaccgcaattgttcctcggttttgccaccgattaccgttttgcaggttggacgctgcgcgatgtggagatggggtataaccacgactctaacgggcgttccgacccgacctcccgcagctggaaccgcctttatactcgcctgatggcagaaaacggtaactggctggtagaagtgaagccgtggtatgtggtgggtaatactgacgataacccggatatcaccaaatatatgggttactaccagcttaaaatcggctatcacctcggtgatgcggtgctcagtgcgaaaggacagtacaactggaacaccggctacggcggcgcggagttaggcttaagttacccgatcaccaaacatgtgcgcctttatactcaggtttacagcggctatggcgaaagcctcatcgactataacttcaaccagacccgtgtcggtgtgggggttatgctaaacgatttgttttgatgaacggttgagtggttggcaaatctggaatccagcatccaggattaccctctcagagactaaaagcattgcagtttctcgcgcaggcgctgaaaatagcgcctgtttttatttcaggcaatcggggtgaatgtggcgcaggcggaagtgttgaatctggagtccggagctaaacaggttttacaagaaacctttggctaccaacagtttcgccccggccaggaagaaattatcgacactgtgctttccggccgcgattgcctcgtcgtcatgcccactggtggcggaaaatccctttgctatcaaatccctgccttattgctaaacggccttaccgtggttgttagtccgctgattagcttgatgaaagatcaggtggatcaactgcaagccaacggcgtggcggcggcgtgccttaacagcacgcaaacccgcgaacagcaacttgaagtgatgacaggctgccgcaccgggcaaattcgtctgctttatatcgccccggaacgcctgatgctggataactttcttgagcatctggcgcactggaatccggtgttattagccgttgatgaagcgcactgtatctcccaatggggccacgatttccgcccggaatatgccgcgctcggtcagttgcgccagcggttcccgacgctgccgtttatggcgctgaccgccacagccgacgacaccacgcgccaggatatcgtgcgcctgctggggctgaacgatccgctgattcaaatcagcagttttgaccgtccgaatattcgctacatgctgatggagaagttcaaaccgctcgatcagttgatgcgctacgtgcaggaacagcgcggtaagagtggcattatctactgcaacagccgcgcgaaagtagaagacaccgctgcgcgcctgcaaagcaagggaattagcgcggcggcctatcatgccgggctggaaaataatgttcgcgccgatgtgcaggaaaaattccagcgcgatgacctgcaaattgtggtggcgacggtggcgttcggcatgggcatcaataaaccaaacgttcgcttcgtggtccactttgatattccgcgcaatatcgaatcctattatcaggaaaccggacgcgccgggcgtgatggcctgcccgcggaagcgatgctgttttacgatccggctgatatggcgtggctgcgccgttgtctggaagagaagccgcaggggcagttgcaggatatcgagcgccacaaactcaatgcgatgggcgcgtttgccgaagcgcaaacttgccgtcgtctggtattgctgaactattttggcgaagggcgtcaggagccgtgcgggaactgcgatatctgcctcgatccgccgaaacagtacgacggtagtaccgatgctcagattgccctttccaccattggtcgtgtgaatcagcggtttgggatgggttatgtggtggaagtgattcgtggtgctaataaccagcgtatccgcgactatggtcatgacaaactgaaagtctatggcatgggccgtgataaaagccatgaacattgggtgagcgtgatccgccagctgattcacctcggcctggtgacgcaaaatattgcccagcattctgccctacaactgacagaggccgcgcgcccggtgctgcgcggcgaatcctctttgcaacttgccgtgccgcgtatcgtggcgctcaaaccgaaagcgatgcagaaaagcttcggcggcaactatgatcgcaaactgttcgccaaattacgcaaactgcgtaaaagcatagccgatgaaagtaatgtcccgccgtacgtggtgtttaacgacgcaaccttgattgagatggctgaacagatgccgatcaccgccagcgaaatgctcagcgttaacggcgttgggatgcgcaagctggaacgctttggcaaaccgtttatggcgctgattcgtgcgcatgttgatggcgatgacgaagagtaatcagcagcataaaaaagtgccagtatgaagactccgtaaacgtttcccccgcgagtcaaatgtatgttgatgttatttctcaccgtcgccatggtgcacattgtggcgcttatgagccccggtcccgatttcttttttgtctctcagaccgctgtcagtcgttcccgtaaagaagcgatgatgggcgtgctgggcattacctgcggcgtaatggtttgggctgggattgcgctgcttggcctgcatttgattatcgaaaaaatggcctggctgcatacgctgattatggtgggcggtggcctgtatctctgctggatgggttaccagatgctacgtggtgcactgaaaaaagaggcggtttctgcacctgcgccacaggtcgagctggcgaaaagtgggcgcagtttcctgaaaggtttactgaccaatctcgctaatccgaaagcgattatctactttggcagcgtgttcagtttgtttgtcggtgataacgttggcactaccgcgcgctggggcatttttgcgctgatcattgtcgaaacgctggcgtggtttaccgtcgttgccagcctgtttgccctgccgcaaatgcgccgtggttatcaacgtctggcgaagtggattgatggttttgccggggcgttatttgccggatttggcattcatttgattattagccggtgatgccagacgcgtcttcagagtaagtcggataaggcgtttacgccgcatccgacattatttttcacgcatgcctcgcgcttgctaacagcgctcccaccagcataaacaagctgccgaaaatcttattcagcgccttcatctgctttggtcctttaatccatagagcaatccgttgagcaagggtggcgtaaccgatcatcacaataatatcgaccacaatagtggtgacgccgagcacgatatactgcatcagttgcggctgttgcggcatgatgaattgcggaaatagcgccgccagaaacacaatacttttgggattggtgagattcacaaaaactgcgcgctggaacaaatgtcgacggctttgagtagaggccaggcttttaaggtcaattgcaccagcggcgcgccactgctggattcccagccaaatcaagtaagccgcgcctgcccacttcaacacttcaaacgcaatcacactgcgggaaaatagcgtccccaaccccacgccaaccagcacaatatgaatcgccagtccggtctgaagcccagcaatagacgccaccgcgccgcgataaccgtggttgaggctggtggtcatagtgttgattgcaccagagcctgggctcaggcttaaaatgatgcttgtcagcaggtaggcaaaccaccattctaaggtcatgatgaactcccggtgtgtctatttttgtgccacaatacgctactgtcgcagcgttgtgtcaggcacgctaaaaaaaacgattttacgtggtttaagaggcagattacccgatgtttcagcagcaaaaagactgggaaacaagagaaaacgcgtttgctgcttttaccatgggaccgctgactgatttctggcgtcagcgtgatgaagcagagtttactggtgtggatgacattccggtgcgctttgtccgttttcgcgcacagcaccatgaccgggtggtagtcatctgcccggggcgtattgagagctacgtaaaatatgcggaactggcctatgacctgttccatttggggtttgatgtcttaatcatcgaccatcgcgggcagggacgttccggtcgcctgttagccgatccgcatctcgggcatgttaatcgctttaatgattatgttgatgatctggcggcattctggcagcaggaggttcagcccggtccgtggcgtaaacgctatatactggcacatagcatgggcggtgcgatctccacattatttctgcaacgccatccaggtgtatgtgacgccattgcgctaactgcgccaatgtttgggatcgtgattcgtatgccgagttttatggcacggcagatcctcaactgggccgaagcgcatccacgtttccgtgatggctatgcaataggcaccgggcgctggcgcgcgttgccgtttgctatcaacgtactgacccacagcagacagcgatatcgacgtaacttacgcttctatgctgatgacccaacgattcgcgtcggtgggccgacctaccattgggtacgcgaaagtattctggctggcgaacaggtgttagccggtgcgggtgatgacgccacgccaacgcttctcttgcaggctgaagaggaacgcgtggtggataaccgcatgcatgaccgtttttgtgaactccgcaccgccgcgggccatcctgtcgaaggaggacggccgttggtaattaaaggtgcttaccatgagatcctttttgaaaaggacgcaatgcgcagtgtcgcgctccacgccatcgttgattttttcaacaggcataacagtcccagcggaaaccgctctacagaggtttaaatttcttatgtaccaggttgttgcgtctgatttagatggcacgttactttctcccgaccatacgttatccccttacgccaaagaaactctgaagctgctcaccgcgcgcggcatcaactttgtgtttgcgaccggtcgtcaccacgttgatgtggggcaaattcgcgataatctggagattaagtcttacatgattacctccaatggtgcgcgcgttcacgatctggatggtaatctgatttttgctcataacctggatcgcgacattgccagcgatctgtttggcgtagtcaacgacaatccggacatcattactaacgtttatcgcgacgacgaatggtttatgaatcgccatcgcccggaagagatgcgcttttttaaagaagcggtgttccaatatgcgctgtatgagcctggattactggagccggaaggcgtcagcaaagtgttcttcacctgcgattcccatgaacaactgctgccgctggagcaggcgattaacgctcgttggggcgatcgcgtcaacgtcagtttctctaccttaacctgtctggaagtgatggcgggcggcgttagtaaaggccatgcgctggaagcggtggcgaagaaactgggctacagcctgaaggattgtattgcgtttggtgacgggatgaacgacgccgaaatgctgagcatggcggggaaaggctgcattatgggcagtgcgcaccagcgtctgaaagaccttcatcccgagctggaagtgattggtactaatgccgacgacgcggtgccgcattatctgcgtaaactctatttaagctaatcgttctttatttggtcagttgtcaacctgatacttcgctacaatggatacccgttaatcaaagagttttccattgtggcgctacttatcatcaccacgattctgtgggccttctcctttagcttttatggcgagtaccttgcggggcacgtcgatagctattttgcggtgctggtgcgcgttggcctggcggcactcgtttttctgccgtttctgcgtacccgtggcaatagcctgaaaacggtcggcctgtatatgctggtgggcgcgatgcagcttggcgtgatgtatatgctgagtttccgcgcttatctctacctgacggtttccgagctgctgctgttcaccgtgctgacgccgctctacatcacgctgatttatgacatcatgagtaagcgccgtctgcgctggggctatgcctttagcgccttgctggcggtgattggtgccgggattattcgctatgatcaggtcaccgaccatttctggactggcttgctgctggtgcaactctccaatatcacttttgccattggcatggtgggttacaaacgcctgatggaaactcgcccgatgccacagcataacgcctttgcgtggttctatcttggcgcgtttctggtggcagtgattgcatggttcttgctgggaaatgcgcagaaaatgccgcaaaccacgctgcaatggggcattctggtgtttcttggcgtggtggcttccgggattggctactttatgtggaactacggcgcgacgcaggtggacgccggaacgctgggcattatgaataatatgcacgttccggcagggctgctggtaaacctggctatctggcaccaacagccgcactggccaacgtttattacaggcgcgctggtgatcctggccagtctgtgggtgcatcgtaagtgggtcgctccgcgctctagtcaaacggcagatgatcgcaggcgtgattgcgcgctgagcgaataattacaggcgcgctggacttcctggcctcactgtgggtgcatcgtaagtgggtcgctccgcgctcttcacaaacggcagatgatcgcaggcgtgattgcgcgcactgcgaataaacgcttccgtaactggctgacgctgctcgccatcgcgcacggcggcgtacagtcggctccacaagccttcgcccagggttttggtcaccaccagaccctggcgctcaaaactctctactacccaatgcggtagcgcggcaatacccatccgcgcggcaaccatctgaatcaacaataaggtgttatcgacgcttttcagactcgggctgacgcctgccggctgaagaaaatgccgccagacatccagtcgactacgctgcaccggataaattaatagcgtctcgctggcgagatcttccggtgtaattcgcgttttcgccgccagtggatggtcaggtgctaacaccagacgcacttcatagtcgaacatcgggctataatgcaggccactgcgcggcagaatatcggacgtcattaccagatccagctctccctgttgcaaggcgggctgcgggtcaaatgtcacgccgcttttaaaatccatctctacctgcggccagttcttatggaaattttctaacgcgggtgtcagccactgaatacagctatggcactcaatggcaatgcgcagacgcgtctgctgcggttcattgcaggcttgcagggcctggctaatttgcggcagtacctggtttgccagttgcaacaggatttctccctgcggtgtaaagcgtagcggctggctcttacgcacaaatagccggaagccaaggcgttgttccagatcgctaaactggtgagacagggcggattgcgtctgatgcaacgtcgccgcagcggctgcgaggctgccgcagttccgcaacgcttgtagcgttttcaggtgttttacttcgatcatgaaagtccttcacttcggcatgaataatttgcgcttgaggaatatacagtaaccgccaattatggatgtgtaaacatctggacggctaaaatccttcgtcttttaaatttatggtgcgttggctgcgtttctccaccccggtcacttacttcagtaagctcccggggatgaataaacttgccgccttccctaaattcaaaatccataggatttacatataattagaggaagaaaaaatgacaatattgaatcacaccctcggtttccctcgcgttggcctgcgtcgcgagctgaaaaaagcgcaagaaagttattgggcggggaactccacgcgtgaagaactgctggcggtagggcgtgaattgcgtgctcgtcactgggatcaacaaaagcaagcgggtatcgacctgctgccggtgggcgattttgcctggtacgatcatgtactgaccaccagtctgctgctgggtaacgttccggcgcgtcatcagaacaaagatggtagcgtagatatcgacaccctgttccgtattggtcgtggacgtgcgccgactggcgaacctgcggcggcagcggaaatgaccaaatggtttaacaccaactatcactacatggtgccggagttcgttaaaggccaacagttcaaactgacctggacgcagctgctggacgaagtggacgaggcgctggcgctgggccacaaggtgaaacctgtgctgctggggccggttacctggctgtggctggggaaagtgaaaggtgaacaatttgaccgcctgagcctgctgaacgacattctgccggtttatcagcaagtgctggcagaactggcgaaacgcggcatcgagtgggtacagattgatgaacccgcgctggtactggaactaccacaggcgtggctggacgcatacaaacccgcttacgacgcgctccagggacaggtgaaactgctgctgaccacctattttgaaggcgtaacgccaaatctcgacacgattactgcgctgcctgttcagggtctgcatgttgacctcgtacatggtaaagatgacgttgctgaactgcacaagcgcctgccttctgactggttgctgtctgcgggtctgatcaatggtcgtaacgtctggcgcgccgatcttaccgagaaatatgcgcaaattaaggacattgtcggcaaacgtgatttgtgggtggcatcttcctgcagcttgctgcacagccccatcgacctgagcgtggaaacgcgtcttgatgcagaagtgaaaagctggtttgccttcgccctacaaaaatgccatgaactggcactgctgcgcgatgcgctgaacagtggtgacacggcagctctggcagagtggagcgccccgattcaggcacgtcgtcactctacccgcgtacataatccggcggtagaaaagcgtctggcggcgatcaccgcccaggacagccagcgtgcgaatgtctatgaagtgcgtgctgaagcccagcgtgcgcgttttaaactgccagcgtggccgaccaccacgattggttccttcccgcaaaccacggaaattcgtaccctgcgtctggatttcaaaaagggcaatctcgacgccaacaactaccgcacgggcattgcggaacatatcaagcaggccattgttgagcaggaacgtttgggactggatgtgctggtacatggcgaggccgagcgtaatgacatggtggaatactttggcgagcacctcgacggatttgtctttacgcaaaacggttgggtacagagctacggttcccgctgcgtgaagccaccgattgtcattggtgacattagccgcccggcaccgattaccgtggagtgggcgaagtatgcgcaaagcctgaccgacaaaccggtgaaagggatgctgacggggccggtgaccatactctgctggagcttcccgcgtgaagatgtcagccgtgaaaccatcgccaaacagattgcgctggcgctgcgtgatgaagtggccgatctggaagccgctggaattggcatcatccagattgacgaaccggcgctgcgcgaaggtttaccgctgcgtcgtagcgactgggatgcgtatctccagtggggcgtagaggccttccgtatcaacgccgccgtggcgaaagatgacacacaaatccacactcacatgtgttattgcgagttcaacgacatcatggatagcattgcggcgctggacgcagacgtcatcaccatcgaaaccagccgttccgacatggagttgctggagagctttgaagagtttgattatccaaatgaaatcggtcctggcgtctatgacattcacagcccaaacgtaccgagcgtggaatggattgaagccttgctgaagaaagcggcaaaacgcattccggcagagcgcctgtgggtcaacccggactgtggcctgaaaacgcgcggctggccagaaacccgcgcggcactggcgaacatggtgcaggcggcgcagaacttgcgtcgggggtaaaatccaaaccgggtggtaataccacccggtcttttctcattacaggctcttcttcccaccatactgcttaaaccattccagcatacgctgccagccatcttctgcagatgcggcatgatagctcgggcgataatcagcgttgaatgcatgcccggcgtccgggtacacgataatctctgctttcgcattagcagcccgcagcgcctggcgcatggtttcaacgctctcctgcggaatgctgttatcctgaccaccatataagccgagaatcggcgcgttaagatcggttgcgatatcaacaggttgtttcggactattcaggctcttgtcgcccgtcagtttgccgtaccacgccactgcggcttttagctgtggattatgcgcggcatacagccaggtgatacgtccaccccagcagaatccggtgatcattaaacgatgaacatcgccgccgttgcgggaagcccaactggcgacatgatcgagatcggccagcacctggctgtcaggcacttttgctaccagaccgctaagcaacgtggggatatcggcaaaatcattcggatcgccttcgcggaagtaaagttcaggtgcgatagccagatacccctccagcgccagacggcgacaaatgtcgcggatatgttcatgcacgccaaaaatttcctgcactacaatgaccactggcagtgggccatcgctttgctttggtctggcatggtaagcaggcatgttatccccttgactagggatagaggtgaagcccgccacaatcgcgtcgtccggggtctgaacgatggtgctagcgagagggcttgcagcaggtgcaaatccagattgttgtgttgttgccatggtattctccgtacccttataaaaatgttgcgcaatgttaactatagtcagcatgcaacaaatcacattgcctgaatcggctcatcttttatgcagtcctgcagaatgaagggtgatttatgtgatttgcatcacttttggtgggtaaatttatgcaacgcatttgcgtcatggtgatgagtatcacgaaaaaatgttaaacccttcggtaaagtgtctttttgcttcttctgactaaaccgattcacagaggagttgtatatgtccaagtctgatgtttttcatctcggcctcactaaaaacgatttacaaggggctacgcttgccatcgtccctggcgacccggatcgtgtggaaaagatcgccgcgctgatggataagccggttaagctggcatctcaccgcgaattcactacctggcgtgcagagctggatggtaaacctgttatcgtctgctctaccggtatcggcggcccgtctacctctattgctgttgaagagctggcacagctgggcattcgcaccttcctgcgtatcggtacaacgggcgctattcagccgcatattaatgtgggtgatgtcctggttaccacggcgtctgtccgtctggatggcgcgagcctgcacttcgcaccgctggaattcccggctgtcgctgatttcgaatgtacgactgcgctggttgaagctgcgaaatccattggcgcgacaactcacgttggcgtgacagcttcttctgataccttctacccaggtcaggaacgttacgatacttactctggtcgcgtagttcgtcactttaaaggttctatggaagagtggcaggcgatgggcgtaatgaactatgaaatggaatctgcaaccctgctgaccatgtgtgcaagtcagggcctgcgtgccggtatggtagcgggtgttatcgttaaccgcacccagcaagagatcccgaatgctgagacgatgaaacaaaccgaaagccatgcggtgaaaatcgtggtggaagcggcgcgtcgtctgctgtaattctcttctcctgtctgaaggccgacgcgttcggccttttgtatttttgcgtagcgcctcgcaggaaatgcctttccaactggacgtttgtacagcacaattctattttgtgcgggtaagttgttgcgtcaggaggcgttgtggatttcagtatcatggtttacgcagttattgcgttggtgggtgtggcaattggctggctgtttgccagttatcaacatgcgcagcaaaaagccgagcaattagctgaacgtgaagagatggtcgcggagttaagcgcggcaaaacaacaaattacccaaagcgagcactggcgtgcagagtgcgagttactcaataacgaagtgcgcagcctgcaaagtattaacacctctctggaggccgatctgcgtgaagtaaccacgcggatggaagccgcacagcaacatgctgacgataaaattcgccagatgattaacagcgagcagcgcctcagtgagcagtttgaaaacctcgccaaccgtatttttgagcacagcaatcgccgggttgatgagcaaaaccgtcagagtctgaacagcctgttgagcccgctacgtgaacaactggacggtttccgccgtcaggttcaggacagcttcggtaaagaagcacaagaacgccataccctgacccacgaaattcgcaatctccagcaactcaacgcgcaaatggcccaggaagcgatcaacctgacgcgcgcgctgaaaggcgacaataaaacccagggcaactggggcgaggtagtattgacgcgggtgttggaggcttccggtctgcgtgaagggtatgaatatgaaacccaggtcagcatcgaaaatgacgcccgcagccggatgcagccggatgtcatcgtgcgcctgccgcagggaaaagatgtggtgatcgacgccaaaatgacgctggtcgcctatgaacgctattttaacgccgaagacgactatacccgcgaaagcgcgctacaggaacatatcgcgagcgtgcgtaaccatatccgtttgctgggacgcaaagattatcaacagctgccggggctgcgaactctggattacgtgctgatgtttattcccgttgaacccgcttttttactggcgcttgaccgccagccggagctgatcaccgaagcgttgaaaaacaacatcatgctggttagcccgactacgctgctggtggcgctgcgcactatcgccaacctgtggcgttatgagcatcaaagccgcaacgcccagcaaatcgccgatcgtgccagcaagctgtacgacaagatgcgtttgttcatcgatgacatgtccgcgattggtcaaagtctcgacaaagcgcaggataattatcggcaggcaatgaaaaaactctctagtgggcgcggaaatgtgctggcgcaggcagaagcgtttcgcggtttaggagtagaaattaaacgcgagattaatccggatttggctgaacaggcggtgagccaggatgaagagtatcgacttcggagcgttccggagcagccgaatgatgaagcttatcaacgcgatgatgaatataatcagcagagccgctaacccattgggagtagttaagccgggtagaaatctagggcatcgacgcccaatctgttacacttctggaacaattttttgatgagcaggcattgagatggtggataagagtcaagaaacgacgcactttggttttcagaccgtcgcgaaggaacaaaaagcggatatggtcgcccacgttttccattccgtggcaagtaaatacgatgtcatgaatgatttgatgagttttggtattcatcgtttgtggaagcgattcacgattgattgcagcggcgtacgccgtgggcagaccgtgctggatctggctggtggcaccggcgacctgacagcgaaattctcccgcctggtcggagaaactggcaaagtggtccttgctgatatcaatgaatccatgctcaaaatgggccgcgagaagctgcgtaatatcggtgtgattggcaacgttgagtatgttcaggcgaacgctgaggcgctgccgttcccggataacacctttgattgcatcaccattagctttggtctgcgtaacgtcaccgacaaagataaagcactgcgtagtatgtatcgcgtgctgaaacccggcggccgcctgctggtgcttgagttcagcaagccaattatcgagccgctgagcaaagcctatgatgcatactccttccatgtgctgccgcgtattggcagtctggtcgcgaacgacgccgacagctaccgttatctggcagaatccatccgtatgcatcccgatcaggataccctgaaagccatgatgcaggatgccggattcgaaagtgtcgactactacaatctgacggcaggggttgtggcgctgcatcgtggttataagttctgacaggagaccggaaatgccttttaaacctttagtgacggcaggaattgaaagtctgctcaacaccttcctgtatcgcagtcccgcgctgaaaacggcccgcagccgtctgctgggtaaagtattgcgcgtggaggtaaaaggctttagcacgagtttgattctggtgttcagcgaacgccaggttgatgtactgggcgaatgggcaggcgatgctgactgcaccgttatcgcctacgccagtgtgttgccgaaacttcgcgatcgccagcagcttaccgcactgattcgcagtggtgagctggaagtgcagggcgatattcaggtggtgcaaaacttcgttgcgctggcagatctggcagagttcgaccctgcggaactgctggccccttataccggtgatatcgccgctgaaggaatcagcaaagccatgcgcggaggcgcaaagttcctgcatcacggcattaagcgccagcaacgttatgtggcggaagccattactgaagagtggcgtatggcacccggtccgcttgaagtggcctggtttgcggaagagacggctgccgtcgagcgtgctgttgatgccctgaccaaacggctggaaaaactggaggctaaatgacgccaggtgaagtacggcgcctatatttcatcattcgcacttttttaagctacggacttgatgaactgatccccaaaatgcgtatcaccctgccgctacggctatggcgatacagtttattctggatgccaaatcggcataaagacaaacttttaggtgagcgactacgactggccctgcaagaactggggccggtttggatcaagttcgggcaaatgttaagtacccgccgcgatctttttccaccgcatattgccgatcagctggcgttattgcaggacaaagttgctccgtttgatggcaagctggcgaagcagcagattgaagctgcaatgggcggcttgccggtagaagcgtggtttgacgattttgaaatcaagccgctggcttctgcttctatcgcccaggttcataccgcgcgattgaaaagcaatggtaaagaggtggtgattaaagtcatccgcccggatattttgccggttattaaagcggatctgaaacttatctaccgtctggctcgctgggtgccgcgtttgctgccggatggtcgccgtctgcgcccaaccgaagtggtgcgcgagtacgaaaagacattgattgatgaactgaatttgctgcgggaatctgccaacgccattcagcttcggcgcaattttgaagacagcccgatgctctacatcccggaagtttaccctgactattgtagtgaagggatgatggtgatggagcgcatttacggcattccggtgtctgatgttgcggcgctggagaaaaacggcactaacatgaaattgctggcggaacgcggcgtgcaggtgttcttcactcaggtctttcgcgacagctttttccatgccgatatgcaccctggcaacatcttcgtaagctatgaacacccggaaaacccgaaatatatcggcattgattgcgggattgttggcagcctaaacaaagaagataaacgctatctggcagaaaactttatcgccttctttaatcgcgactatcgcaaagtggcagagctacacgtcgattctggctgggtgccaccagataccaacgttgaagagttcgaatttgccattcgtacggtctgtgaacctatctttgagaaaccgctggccgaaattagctttggacatgtactgttaaatctgtttaatacggcgcgtcgcttcaatatggaagtgcagccgcaactggtgttactccagaaaaccctgctctacgtcgaaggggtaggacgccagctttatccgcaactcgatttatggaaaacggcgaagcctttcctggagagctggattaaagatcaggtcggtattcctgcgctggtgagagcatttaaagaaaaagcgccgttctgggtcgaaaaaatgccagaactgcctgaattggtttacgacagtttgcgccagggcaagtatttacagcacagtgttgataagattgcccgcgagcttcagagtaatcatgtacgtcagggacaaagccgttattttctcggaattggcgctacgttagtattaagtggcacattcttgttggtcagccgacctgaatgggggctgatgcccggctggttaatggcaggtggtctgatcgcctggtttgtcggttggcgcaaaacacgctgattttttcatcgctcaaggcgggccgtgtaacgtataatgcggctttgtttaatcatcatctaccacagaggaacatgtatgggtggtatcagtatttggcagttattgattattgccgtcatcgttgtactgctttttggcaccaaaaagctcggctccatcggttccgatcttggtgcgagcatcaaaggctttaaaaaagcaatgagcgatgatgaaccaaagcaggataaaaccagtcaggatgctgattttactgcgaaaactatcgccgataagcaggcggatacgaatcaggaacaggctaaaacagaagacgcgaagcgccacgataaagagcaggtgtaatccgtgtttgatatcggttttagcgaactgctattggtgttcatcatcggcctcgtcgttctggggccgcaacgactgcctgtggcggtaaaaacggtagcgggctggattcgcgcgttgcgtagtctggcgacaacggtgcagaacgaactgacccaggagttaaaactccaggagtttcaggacagtctgaaaaaggttgaaaaggcgagcctcactaacctgacgcccgaactgaaagcgagcatggatgaactacgccaggccgcggagagcatgaagcgttcctacgttgcaaacgatcctgaaaaggcgagcgatgaagcgcacaccatccataacccggtggtgaaagataatgaagctgcgcatgagggcgtaacgcctgccgctgcacaaacgcaggccagtagcccggaacagaagccagaaaccacgccagagccggtggtaaaacctgctgcggacgctgaaccgaaaaccgctgcaccttcccctagcagcagtgataaaccgtaaacatgtctgtagaagatactcaaccgcttatcacgcatctgattgagctgcgtaagcgtctgctgaactgcattatcgcggtgatcgtgatattcctgtgtctggtctatttcgccaatgacatctatcacctggtatccgcgccattgatcaagcagttgccgcaaggtagtacgatgatcgccaccgacgtggccagcccgttctttacgccgatcaagctgacctttatggtgagcctgattctgagtgcgccggtgattctctatcaggtgtgggcatttatcgccccagcgctgtataagcatgaacgtcgcctggtggtgccgctgctggtttccagctctctgctgttttatatcggcatggcattcgcctactttgtggtctttccgctggcatttggcttccttgccaataccgcgccggaaggggtgcaggtatccaccgacatcgccagctatttaagcttcgttatggcgctgtttatggcgtttggtgtctcctttgaagtgccggtagcaattgtgctgctgtgctggatggggattaccagcccagaagacttacgcaaaaaacgcccgtatgtgctggttggtgcattcgttgtcgggatgttgctgacgccgccggatgtcttcagccaaacgctgttggcgatcccgatgtactgtctgtttgaaatcggtgtcttcttcagtcgcttttacgttggtaaagggcgaaatcgggaagaggaaaacgacgctgaagcagaaagcgaaaaaactgaagaataaattcaaccgcccgtcagggcggttgtcatatggagtacaggatgtttgatatcggcgttaatttgaccagtagccaatttgcgaaagaccgtgatgatgttgtagcgtgcgcttttgacgcgggagttaatgggctactcatcaccggcactaacctgcgtgaaagccagcaggcgcaaaagctggcgcgtcagtatagctcctgttggagtacggcgggcgtacatcctcacgacagcagccagtggcaagctgcgactgaagaagcgattattgagctggccgcgcagccagaagtggtggcgactggtgaatgtggtctcgactttaaccgcaactttagcacgccggaagagcaggaacgcgcttttgttgcccagctacgcattgccgcagatttaaacatgccggtatttatgcactgtcgcgatgcccacgagcggtttatgacattgctggagccgtggctggataaactgcctggtgcggttcttcattgctttaccggcacacgcgaagagatgcaggcgtgcgtggcgcatggaatttatatcggcattaccggttgggtttgcgatgaacgacgcggactggagctgcgggaacttttgccgttgattccggcggaaaaattactgatcgaaactgatgcgccgtatctgctccctcgcgatctcacgccaaagccaagttcccggcgcaacgagccagcccatctgccccatattttgcaacgtattgcgcactggcgtggagaagatgccgcatggctggctgccaccacggatgctaatgtcaaaacactgtttgggattgcgttttaaagtttgcggaactcggtattcttcacactgtgcttaatctctttattaataagattaagcaatagcatggagcgagcctcaccatcgggttcggtgaaaatggcctgaaagccttcgaacgcgccttcggtaataatcaccttatcacccggataaggggttgccggatcgacaatgtctttcggtttatatacgcttagctgatgaataaccgcgcttgggactatcgctgggctcgcgccaaagcgcacgaagtggctgacaccgcgggtcgcgttgatagtcgtggtatgaatcacttctgggtcaaattccacaaacaggtagttggggaacaatggctcactgactgcagtacgttttccacgcacgattttttccagggtgatcatcggtgccaggcaattcacagcctgtctttcgaggtgttcctgggcacgttgaagttgcccgcgcttgcagtacagtaaataccaggattgcataatgactcttatccgtttaatcggggcgcaaggatagcaaaagctttacgctaagttaattatattccccggtttgcgttataccgtcagagttcacgctaatttaacaaatttacagcatcgcaaagatgaacgccgtataatgggcgcagattaagaggctacaatggacgccatgaaatataacgatttacgcgacttcttgacgctgcttgaacagcagggtgagctaaaacgtatcacgctcccggtggatccgcatctggaaatcactgaaattgctgaccgcactttgcgtgccggtgggcctgcgctgttgttcgaaaaccctaaaggctacagtatgccggtgctgtgcaacctgttcggtacgccaaagcgcgtggcgatgggcatggggcaggaagatgttagcgcgctgcgtgaagttggtaaattattggcgtttctgaaagagccggagccgccaaaaggtttccgcgacctgtttgataaactgccgcagtttaagcaagtattgaacatgccgacaaagcggctgcgtggtgcgccctgccaacaaaaaatcgtctctggcgatgacgtcgatctcaatcgcattcccattatgacctgctggccggaagatgccgcgccgctgattacctgggggctgacagtgacgcgcggcccacataaagagcggcagaatctgggcatttatcgccagcagctgattggtaaaaacaaactgattatgcgctggctgagccatcgcggcggcgcgctggattatcaggagtggtgtgcggcgcatccgggcgaacgtttcccggtttctgtggcgctgggtgccgatcccgccacgattctcggtgcagtcactcccgttccggatacgcttagtgagtatgcgtttgccggattgctacgtggcaccaagaccgaagtggtgaagtgtatctccaatgatcttgaagtgcccgccagtgcggagattgtgctggaagggtatatcgaacaaggcgaaactgcgccggaagggccgtatggcgaccacaccggttactataatgaagtcgatagtttcccggtatttaccgtgacgcatattacccagcgtgaagatgcgatttaccattccacctataccgggcgtccgccagatgagcccgcggtgctgggtgtcgcactgaacgaagtgtttgtgccgattctgcaaaaacagttcccggaaattgtcgatttttacctgccgccggaaggctgctcttatcgcctggcggtagtgacaatcaaaaaacagtacgccggacacgcgaagcgcgtcatgatgggcgtctggagcttcttacgccagtttatgtacactaaatttgtgatcgtttgcgatgatgacgttaacgcacgcgactggaacgatgtgatttgggcgattaccacccgtatggacccggcgcgggatactgttctggtagaaaatacgcctattgattatctggattttgccagccctgtctccgggctgggtagtaaaatggggctggatgccacgaataaatggccgggggaaacccagcgtgaatggggacgtcccatcaaaaaagatccagatgttgtcgcgcatattgacgccatctgggatgaactggctatttttaacaacggtaaaagcgcctgatgcgcgtttgttttgccctatttatcgatccgacagagaaagcgcatgacaaccttaagctgtaaagtgaccagcgtagaagctatcacggataccgtatatcgtgtccgcatcgtgccagacgcggccttttcttttcgtgctggtcagtatttgatggtagtgatggatgagcgcgacaaacgtccgttcagtatggctagcacgccggatgaaaaagggtttatcgagctgcatattggcgcttctgaaatcaacctttacgcgaaagcagtcatggaccgcatcctcaaagatcatcaaatcgtggtcgacattccccacggagaagcgtggctgcgcgatgatgaagagcgtccgatgattttgattgcgggcggcaccgggttctcttatgcccgcagcattttgctgacagcgttggcgcgtaacccaaaccgtgatatcaccatttactggggcgggcgtgaagagcagcatctgtatgatctctgcgagcttgaggcgcttagcttgaagcatcctggtctgcaagtggtgccggtggttgaacaaccggaagcgggctggcgtgggcgtactggcaccgtgttaacggcggtattgcaggatcacggtacgctggcagagcatgatatctatattgccggacgttttgagatggcgaaaattgcccgcgatctgttttgcagtgagcgtaatgcgcgggaagatcgcctgtttggcgatgcgtttgcatttatctgagatataaaaaaacccgcccctgacaggcgggaagaacggcaactaaactgttattcagtggcatttagatctatgacgtatctggcaaaccatgcccgatgcgacgctgtcgcgtcttatcgtgcctacaaatagtccgaaccgtaggccggataaggcgtttacgccgcatccggcaattggtgcatgatgcctgatgcgacgctgtcgcgtcttatcgtgcctacaaatagtccgaaccgtaggccggataaggcgtttacgccgcatccggcaattggtgcatgatgcctgatgcgacgctggcgcgtcttatcaggcctacattggtgccggatcggtagaccggataaggcgttcacgccgcatccggcaagtggttaaacccgctcaaacaccgtcgcaataccctgacccagaccgatacacatcgtcgccagaccaaactgaacgtctttgcgttccatcagattcagcagcgtggtgctgatacgcgcaccggaacaacccagcggatgacccagcgcgatcgcgccaccgttgaggttgatcttctcgtcaatctgctcaattagtcccagatctttaatacatggcaggatctgcgcggcaaaggcttcgttcatttcaaacacgccgatatcgctggcagaaagccccgcttttttcagcgccagtttgctggccggaaccgggccgtaacccataatgcttgggtcacaaccaacgaccgccatgctacgcacacgagcgcgcggcttaagacctaattcatgggcgcggctttcactcatcaccagcatggcagctgcgccatcggaaagtgcagaagatgtgcccgccgttaccataccgtttactggatcaaacgccggacgcagcgtggcgagggcttccacggtggtttccgggcgaatcacttcgtcgtaattaaactgcttcaggacgccgtcggcatcgtgaccaccggtcgggatgatttcatttttaaatgcggcgctctgcgtggcggcccaggcgcgggcgtgactccgcgcggcaaaggcatcctgcatttcacggctgataccgtgcatacgcgccagcatttctgccgttaagcccatcatgcccgccgctttggcgacattgcggctcaggccggggtgaaaatcgacgccgtgactcatcggcacatggcccatatgctccacgccgccaaccagacatgcctgcgcatcgccagtcatgatcattcgtgctgcgtcatgcagtgcctgcatggaactaccacacaagcgattaacggtaaccgccgggacagagtgtggtacttctgccagcagcgccgcgttacgggcgatattaaaaccctgctccagcgtctgctgcacacaaccccagtaaatatcgtcgagggccgccgcttccagcgccgggttacgcgccagcaggctacgcattaaatgagcggagagatcttctgcacgcacgttacgaaaagcaccgcccttgctacggcccatcggggtgcgaattgcatcgacaatgacaacctgttccattgtgactccttaagccgttttcaggtcgccaaccggacgggctggctcaaccggaggatagtacggttcgttatgacgcgctttattacgcagaccttccggcacttcatacagcgggccgaggtgctgatattgctgtgccatatcgaggtattttgcgctaccgagggtgtccagccagcggaacgcgccgccgtggaacggagggaagcccaggccgtagaccagcgccatatccgcttccgccggagtggcgataatgccttcctccagacagcgcaccacttcgttgaccatcgggatcatcatgcgggcgataatctcttcttcgctgaagtcgcgcttcggctggctcacttctgccagcaggtcttcaacggcggcgtcttcttctttcttcggcttacctttgctgtcttctttataacgccagaaaccgaggccgttcttctgaccaaagcggttggcatcaaacagcgcgtcgatggcatcgcggtaatctttctgcatccgctgcgggaagcctgctgccatgacagcctgagcgtgatgcgcggtatcaatgcccacaacgtccagcagatatgccgggcccatcggccagccaaactgtttttccatcactttgtcgatcttgcggaaatccgcgccgtcgcgcagcagctggctgaaaccggcgaaatacgggaacagcacgcggttaacaaagaagccggggcagtcgttaaccacaatcggcgtcttgcccatcttgctcgcccaggcgacaactttcgcgatggtttcgtcggagcttttctcgccgcgaataatttctaccaacggcattcggtggaccgggttaaagaagtgcatcccgcagaagttttccgggcgttccagcgcgttggccagttcgctgataggaatggtactagtgttagacgccagcacggtatcctggcgtactttttgttcggtttctgccagtacggcttttttcactttcgggttttcaacaaccgcttctaccacaatatccacgcggtcaaatccggcgtagtcgagcgttgggtggattgtggagatcacgccagccagtttcagaccatcgatcttgccgcgctcaagctgcttgttcagcagtttcgcggcttcggtcatgccgagggttaagctcttgtcgttgatatctttcatgacaaccggcacgcctttccacgcagactggtaagcgatgccgccgcccataatgcctgcacccagcaccgcggcctgtttcggggtttcaacgtctttggtgagtttcttcgctttgccttttacatattgatcgttaaggaaaatgccgaccagtgcgcgggcttcgttggtatgcgccagcgggacaaaacttttgttttccaggtttaaggcttcttcacgaccaaaacgggccgcagcttcaatggtttttactgcggtgatgggggccggataatgtttccccgctgtttgtgcgaccatccctttagcgatggtgaagctcatggtggcttcaatcttgctcagttttagtggttccagcttcggctgacgttttgctttccagtcgaggtcgccgttaatggcctggcgtaaaaccgcctttgcgccttcaaccagtttttctgctttgactacgccatccaccagaccgattttcagcgcctgatccgcgccgacatctttaccggcggcaatgatttccagcgcactgtcagcgcccagcatacgtggcatacgtacagaaccgccaaagccaggcatgatgcccagtttggtttccggcagaccgatgcgcagatccggcgtcgccagacgataatcggtcgccagcacgcattcgcagccaccgcccagcgcatagccattgacggcagcaatggtcggcaccggcagatcttccaggcgattaaacacgctattggcaaagtgcagccactgacttaactgttcttcaggaacgaggaacagggacaaaaattcggtgatatcagcaccgacgataaaggctgctttgttgctacgcagcagcagcccttttagatcactttgctgttccagcacgccgatggcctcgccgaggctggcgacggtcgcagtgtcgagtttattaacactacctggggcatcaaataccagttcggcaatgccatcttccagccagtcaaggtacagggtgtcgcctttgtaaagcatgtcagtctcctgaatccgcaaggtgatctggtcgtaccagatgagtcgaagtgtgtattttgtgttaaaaatatgcaaacaaaagattaaagaaatgccgatctgatcacgctcggcagaaatcacgctctggatgaacgatgtgctaagatgcggagacttaaggtcaaaaaaacagaagggtaaaaaatggaaagtctggccagcctctataaaaatcatatagctaccttacaagaacggactcgcgatgcgctggcgcgcttcaagctggatgcgttacttattcactccggcgagctgttcaatgtttttctcgacgatcatccctatccgtttaaagtgaacccgcaattcaaagcgtgggtgccggtaactcaggtgccaaactgctggttgctggtggatggcgtgaacaagccgaaactgtggttctatctgccggttgattactggcacaacgtcgaaccgctgccgacctctttctggactgaagatgtggaagtgatcgcgctgccgaaagccgatggcattggtagcctgctgcctgctgcgcgcggcaatatcggttatatcggtccggtgccggaacgtgcgctgcaactgggtattgaggccagcaacatcaacccgaaaggggttatcgactacctgcattactatcgctccttcaaaactgagtacgaactggcctgtatgcgtgaagcgcagaaaatggcggtcaacggtcaccgcgcggcagaagaagcgttccgttctggcatgagcgagttcgatatcaacattgcctatctgaccgcgaccggtcatcgtgataccgacgtaccttacagcaacattgtggcgcttaacgaacacgctgcggtactgcattacaccaaactggaccatcaggcaccggaagagatgcgcagcttcctgctggatgccggggcagaatataacggctatgcggctgacctgacccgtacctggagcgcaaaaagtgacaacgactacgcgcagctggtgaaggacgttaatgatgaacaactggcgctgatcgccaccatgaaagcaggcgtcagctatgtggattaccacatccagttccatcagcgcatcgccaaactgctgcgtaaacatcaaatcatcaccgatatgagtgaagaagcgatggtcgaaaacgatcttaccgggccgtttatgccgcatggtatcggccatccgctgggcctgcaggtgcatgacgtcgctggttttatgcaggatgatagcggtacgcacctcgcggcaccggcaaaatatccgtacctgcgctgcacccgtattctccagccgggcatggtgttaaccatcgaaccgggtatctacttcatcgaaagcctactggcaccgtggcgtgaagggcagttcagcaagcacttcaactggcagaaaattgaagcactgaaaccgttcggcggcattcgtatcgaagacaacgtggtgatccacgaaaacaacgtggaaaacatgacccgggatctgaaactggcgtgatggaaagctggttaattcctgcggcaccggtcacggtcgttgaagagatcaaaaagagccgcttcataacgatgttggcgcataccgatggcgttgaggcggcgaaagcgtttgttgaaagcgtgcgggcagaacaccccgatgcccggcaccattgcgtggcgtgggtcgcgggtgcgccggatgattctcaacagctgggtttctctgacgacggggagccggcgggaacggcaggtaaaccgatgctcgcccagctaatgggcagcggcgtcggggaaattaccgctgtggtagtgcgctactacggcggcatattgcttggcaccggtgggttagtgaaagcgtatggcggcggcgtgaatcaggcgctgcgccagctaacgacccaacgcaagacgccattaaccgaatatactttgcaatgtgaatatcatcagttaaccggcattgaagcgttgctggggcagtgtgacggcaaaattatcaacagtgattatcaggcattcgttctgctgcgggtggcgcttccggcggcgaaagtggctgaattttccgcaaagctggcggattttagccgtggtagtttgcaattgttagcgattgaagaataatccccacttcgttttgcagaactaaggaagcggcagagatgcattttcgcgccattacccgaatcgttggactactggtcatcttatttagtgggaccatgattatccctgggctggtagcactcatctaccgggatggagcgggccgcgcttttacccagaccttttttgtcgccctcgccattggctctatgctgtggtggccgaaccgcaaagagaaaggcgaacttaaatcccgtgaggggtttctgatagtggtgctgttctggaccgtgctgggtagcgtcggtgcgctcccttttatcttcagcgaaagcccgaacctcacgattaccgatgcgttttttgaatctttctctggcctgaccactacgggagccactacgctggtggggctggatagcctccctcacgccatcctcttttatcgccagatgctgcaatggtttggcgggatggggatcatcgtgttggcggttgcgatactgcctatcctcggcgtgggtgggatgcagctctatcgcgcagaaatgcccggcccgctgaaagataacaaaatgcgcccgcgaattgcggaaacggcgaaaaccctgtggttgatttatgtcttgctgaccgtcgcctgtgcgctggcgttgtggtttgccggaatggatgcctttgatgccatcggccatagctttgcgactatcgctattggcggcttcagcacacatgatgccagtatcggttatttcgatagcccgactattaacactatcattgctatcttcctgctgatctccggctgtaactacggtctgcactttagtctgttaagtgggcgtagtctgaaggtttattggcgcgatccggaatttcgcatgtttatcggcgtacagtttacgctggtggttatttgtaccctcgtactgtggtttcataatgtctacagtagcgcgctgatgacaattaaccaggcgtttttccaggtggtgagcatggcgacaaccgccgggtttacaactgacagcattgcccgctggccgctctttttgccggtactgcttttatgtagtgcctttatcggcggttgcgccgggagtacgggcggtggcctgaaggtgatccgcatcctgctgctgtttaagcaggggaaccgtgagctgaaacgactggtgcatccgaacgccgtctatagcattaagctggggaatcgcgcactgccggaacgtatcctcgaagccgtttggggatttttctccgcctatgcattggtgtttattgtcagtatgctggcgattatcgccacgggcgtggatgacttttctgcctttgcgagcgttgttgcgacattgaataacctggggccagggcttggcgtggttgctgataactttaccagtatgaacccggtggctaaatggatcctgattgccaacatgctgtttggtcgtctcgaggtctttacattgctggtgctctttaccccgactttctggcgtgaatgatggagtaatacgtgaaaacattaattcttttcagtacaagggacggacaaacgcgcgagattgcctcctacctggctagcgaactgaaagaactggggatccaggcggatgtcgccaatgtgcaccgcattgaagaaccacagtgggaaaactatgaccgtgtggtcattggtgcttctattcgctatggtcactaccatagtgcgttccaggaatttgtcaaaaaacatgcgacgcggctgaatagcatgccgagcgccttttactccgtgaatctggtggcgcgcaaaccggagaagcgtactccacagaccaacagctacgcgcgcaagtttctgatgaacagccaatggcgtcccgatcgctgcgcggtcattgccggggcgctgcgttacccacgttatcgctggtacgaccgttttatgatcaagctgattatgaagatgagtggcggtgaaacggatacgcgcaaagaagttgtctataccgattgggagcaggtggcgaatttcgcccgagaaatcgcccatttaaccgacaaaccgacgctgaaataagcataaagaataaaaaatgcgcggtcagaaaattattttaaatttcctcttgtcaggccggaataactccctataatgcgccaccactgacacggaacaacggcaaacacgccgccgggtcagcggggttctcctgagaactccggcagagaaagcaaaaataaatgcttgactctgtagcgggaaggcgtattatgcacaccccgcgccgctgagaaaaagcgaagcggcactgctctttaacaatttatcagacaatctgtgtgggcactcgaagatacggattcttaacgtcgcaagacgaaaaatgaataccaagtctcaagagtgaacacgtaattcattacgaagtttaattctttgagcgtcaaacttttaaattgaagagtttgatcatggctcagattgaacgctggcggcaggcctaacacatgcaagtcgaacggtaacaggaagaagcttgcttctttgctgacgagtggcggacgggtgagtaatgtctgggaaactgcctgatggagggggataactactggaaacggtagctaataccgcataacgtcgcaagaccaaagaggggtaccttcgggcctcttgccatcggatgtgcccagatgggattagctagtaggtggggtaacggctcacctaggcgacgatccctagctggtctgagaggatgaccagccacactggaactgagacacggtccagactcctacgggaggcagcagtggggaatattgcacaatgggcgcaagcctgatgcagccatgccgcgtgtatgaagaaggccttcgggttgtaaagtactttcagcggggaggaagggagtaaagttaatacctttgctcattgacgttacccgcagaagaagcaccggctaactccgtgccagcagccgcggtaatacggagggtgcaagcgttaatcggaattactgggcgtaaagcgcacgcaggcggtttgttaagtcagatgtgaaatccccgggctcaacctgggaactgcatctgatactggcaagcttgagtctcgtagaggggggtagaattccaggtgtagcggtgaaatgcgtagagatctggaggaataccggtggcgaaggcggccccctggacgaagactgacgctcaggtgcgaaagcgtggggagcaaacaggattagataccctggtagtccacgccgtaaacgatgtcgacttggaggttgtgcccttgaggcgtggcttccggagctaacgcgttaagtcgaccgcctggggagtacggccgcaaggttaaaactcaaatgaattgacgggggcccgcacaagcggtggagcatgtggtttaattcgatgcaacgcgaagaaccttacctggtcttgacatccacggaagttttcagagatgagaatgtgccttcgggaaccgtgagacaggtgctgcatggctgtcgtcagctcgtgttgtgaaatgttgggttaagtcccgcaacgagcgcaacccttatcctttgttgccagcggtccggccgggaactcaaaggagactgccagtgataaactggaggaaggtggggatgacgtcaagtcatcatggcccttacgaccagggctacacacgtgctacaatggcgcatacaaagagaagcgacctcgcgagagcaagcggacctcataaagtgcgtcgtagtccggattggagtctgcaactcgactccatgaagtcggaatcgctagtaatcgtggatcagaatgccacggtgaatacgttcccgggccttgtacacaccgcccgtcacaccatgggagtgggttgcaaaagaagtaggtagcttaaccttcgggagggcgcttaccactttgtgattcatgactggggtgaagtcgtaacaaggtaaccgtaggggaacctgcggttggatcacctccttaccttaaagaagcgttctttgaagtgctcacacagattgtctgatgaaaatgagcagtaaaacctctacaggcttgtagctcaggtggttagagcgcacccctgataagggtgaggtcggtggttcaagtccactcaggcctaccaaatttgcacggcaaatttgaagaggttttaactacatgttatggggctatagctcagctgggagagcgcctgctttgcacgcaggaggtctgcggttcgatcccgcatagctccaccatctctgtagtgattaaataaaaaatacttcagagtgtacctgcaaaggttcactgcgaagttttgctctttaaaaatctggatcaagctgaaaattgaaacactgaacaacgaaagttgttcgtgagtctctcaaattttcgcaacacgatgatgaatcgaaagaaacatcttcgggttgtgaggttaagcgactaagcgtacacggtggatgccctggcagtcagaggcgatgaaggacgtgctaatctgcgataagcgtcggtaaggtgatatgaaccgttataaccggcgatttccgaatggggaaacccagtgtgtttcgacacactatcattaactgaatccataggttaatgaggcgaaccgggggaactgaaacatctaagtaccccgaggaaaagaaatcaaccgagattcccccagtagcggcgagcgaacggggagcagcccagagcctgaatcagtgtgtgtgttagtggaagcgtctggaaaggcgtgcgatacagggtgacagccccgtacacaaaaatgcacatgctgtgagctcgatgagtagggcgggacacgtggtatcctgtctgaatatggggggaccatcctccaaggctaaatactcctgactgaccgatagtgaaccagtaccgtgagggaaaggcgaaaagaaccccggcgaggggagtgaaaaagaacctgaaaccgtgtacgtacaagcagtgggagcacgcttaggcgtgtgactgcgtaccttttgtataatgggtcagcgacttatattctgtagcaaggttaaccgaataggggagccgaagggaaaccgagtcttaactgggcgttaagttgcagggtatagacccgaaacccggtgatctagccatgggcaggttgaaggttgggtaacactaactggaggaccgaaccgactaatgttgaaaaattagcggatgacttgtggctgggggtgaaaggccaatcaaaccgggagatagctggttctccccgaaagctatttaggtagcgcctcgtgaattcatctccgggggtagagcactgtttcggcaagggggtcatcccgacttaccaacccgatgcaaactgcgaataccggagaatgttatcacgggagacacacggcgggtgctaacgtccgtcgtgaagagggaaacaacccagaccgccagctaaggtcccaaagtcatggttaagtgggaaacgatgtgggaaggcccagacagccaggatgttggcttagaagcagccatcatttaaagaaagcgtaatagctcactggtcgagtcggcctgcgcggaagatgtaacggggctaaaccatgcaccgaagctgcggcagcgacactatgtgttgttgggtaggggagcgttctgtaagcctgtgaaggtgtgctgtgaggcatgctggaggtatcagaagtgcgaatgctgacataagtaacgataaagcgggtgaaaagcccgctcgccggaagaccaagggttcctgtccaacgttaatcggggcagggtgagtcgacccctaaggcgaggccgaaaggcgtagtcgatgggaaacaggttaatattcctgtacttggtgttactgcgaaggggggacggagaaggctatgttggccgggcgacggttgtcccggtttaagcgtgtaggctggttttccaggcaaatccggaaaatcaaggctgaggcgtgatgacgaggcactacggtgctgaagcaacaaatgccctgcttccaggaaaagcctctaagcatcaggtaacatcaaatcgtaccccaaaccgacacaggtggtcaggtagagaataccaaggcgcttgagagaactcgggtgaaggaactaggcaaaatggtgccgtaacttcgggagaaggcacgctgatatgtaggtgaagcgacttgctcgtggagctgaaatcagtcgaagataccagctggctgcaactgtttattaaaaacacagcactgtgcaaacacgaaagtggacgtatacggtgtgacgcctgcccggtgccggaaggttaattgatggggttagccgcaaggcgaagctcttgatcgaagccccggtaaacggcggccgtaactataacggtcctaaggtagcgaaattccttgtcgggtaagttccgacctgcacgaatggcgtaatgatggccaggctgtctccacccgagactcagtgaaattgaactcgctgtgaagatgcagtgtacccgcggcaagacggaaagaccccgtgaacctttactatagcttgacactgaacattgagccttgatgtgtaggataggtgggaggctttgaagtgtggacgccagtctgcatggagccgaccttgaaataccaccctttaatgtttgatgttctaacgttgacccgtaatccgggttgcggacagtgtctggtgggtagtttgactggggcggtctcctcctaaagagtaacggaggagcacgaaggttggctaatcctggtcggacatcaggaggttagtgcaatggcataagccagcttgactgcgagcgtgacggcgcgagcaggtgcgaaagcaggtcatagtgatccggtggttctgaatggaagggccatcgctcaacggataaaaggtactccggggataacaggctgataccgcccaagagttcatatcgacggcggtgtttggcacctcgatgtcggctcatcacatcctggggctgaagtaggtcccaagggtatggctgttcgccatttaaagtggtacgcgagctgggtttagaacgtcgtgagacagttcggtccctatctgccgtgggcgctggagaactgaggggggctgctcctagtacgagaggaccggagtggacgcatcactggtgttcgggttgtcatgccaatggcactgcccggtagctaaatgcggaagagataagtgctgaaagcatctaagcacgaaacttgccccgagatgagttctccctgactccttgagagtcctgaaggaacgttgaagacgacgacgttgataggccgggtgtgtaagcgcagcgatgcgttgagctaaccggtactaatgaaccgtgaggcttaaccttacaacgccgaaggtgttttggcggattgagagaagattttcagcctgatacagattaaatcagaacgcagaagcggtctgataaaacagaatttgcctggcggcagtagcgcggtggtcccacctgaccccatgccgaactcagaagtgaaacgccgtagcgccgatggtagtgtggggtctccccatgcgagagtagggaactgccaggcatcaaataaaacgaaaggctcagtcggaagactgggcctttcgttttatctgttgtttgtcggtgaacgctctcctgagtaggacaaatccgccgggagcggatttgaacgttgcgaagcaacggcccggagggtggcgggcaggacgcccgccataaactgccaggcatcaaattaagcagaaggccatcctgacggatggcctttttgcattggcgcagaaaaaaatgccggatgcgacgctggcgcgtcttatccagcctactcttgcttatccgttctgcttttgcatccactccaccacaaaatcagccagcccctcaacatcattaatatccagtaatgcgacatcaagattaagcggcacatcactggctacagcaataacatgcctgtctatcactaattcttcaggtcgatgtccggctccatcgcgaaacagcacaatctttgcgatctcttcatgcttaaacccttcgaccagaatcaaatccagcttactggtatccattcgacttgcgagaaactgtagatccagctcttcttcgtctggtgtttccgtcatcaaggcccatcgttgctggctggcaacgatggtttgtaccgcgccagccttgcgcagctcatagctatctttgcctggcttatcaacatccatatcatggtgcgtatgcttaatcagccctggacggatccctctggcgcataatgccgggatcagttttttcaaaagcgtagtttttccggtaccactccacgcggcaaaggcgagtaacggtatcatcgtttttcctgccatcgggcaagctcctctggcgtattcacgttaacaaatgcatctttatgatcgctgaaatcaaccgcatgaccgccagccagacgcataaataccattacccggcgttctcctgcttgcagatattccagtaataaaggctcaatagcgcggtttaccagagcaatagtcgggtgatcgcgttcaccgtcatggacccacacgacaggcgcatctttgcgctgatgattaagcctggctgctaaatcagggggaatgtaaggcgtatcgcacgggcaaaacaaaaaccactcaccagcttcctgctgcattacactaagcattcctgccagagggcctgggtaatccgccagactatcttcaatcactttcagaccgcttgcctgatagatttcctgatgacgattagcattaaccacgacgtgagagagctgcgtcataagcgcgtcagcgacatgttgccataatggtttgccgtttaattcaagcaatcctttatctacgccgcccattcgtctggctttaccgcctgccagcacaacgcctgttatcgtcgtcatcagattcaccgatatcgcctcttttattgtgggattgaccctgctaacgtgtctgtctcaagagtaaggagcatcactatgaaatgtaaacgtctgaatgaagttattgaactcctccagccagcctggcaaaaagagccagaccttaacctgctgcaatttttgcagaaactggcgaaagagagtggttttgacggcgaactggcggatttgacggatgacattctgatctatcacctgaaaatgcgtgattccgcgaaagatgcggtgatcccgggtttgcagaaagattatgaagaagacttcaaaacggcgctgttacgcgctcgcggcgtaattaaagagtaaaagcttgtaagcggcgccaccaaaatcatcgtgaaatgatatccttcgtcattcgtaatgttttccggatgatgggatgaataacagcgcttttactttccagacactacacccggataccatcatggacgctctgtttgagcatgggatccgggtggattccggtcttaccccgcttaacagctatgaaaaccgtgtctatcaatttcaggacgaagatcgtcgacgttttgtcgtcaaattttatcgccctgaacgttggacagccgatcaaatcctcgaagaacatcaatttgcgttgcagctggtaaatgatgaagttccggtcgcagcacctgtggcctttaacggtcagactttattgaatcatcagggattttatttcgctgtttttccaagcgtcggtggtcgccagttcgaagctgataatatcgatcagatggaagcggttgggcgttatttagggcgtatgcaccagacggggcgcaaacagctttttatccatcgcccgaccatcggtttgaacgaatatctcattgagccacgcaagctgtttgaggacgctacactgataccttccgggttgaaagcggcattcctgaaagcgacagatgagctgattgccgccgttacagcacactggcgggaagatttcaccgttctgcggctacatggagactgccacgccgggaatattctctggcgcgatggtccaatgtttgttgatctggatgatgcacgtaatggtccagccgttcaggatttgtggatgttgctcaatggcgataaagccgagcagcggatgcaactggaaactattattgaagcttatgaagaatttagcgagttcgacaccgctgaaatcggactgattgaacctttacgcgccatgcgtttggtttattatcttgcctggctaatgcggcgttgggctgatcccgcgttcccgaaaaatttcccgtggttaaccggggaagattactggctgcgacagacggcgacttttatagaacaggcaaaagttctacaagaaccccctttgcaattaacacctatgtattaatcggagagagtagatcatgaaaaagatttggctggcgctggctggtttagttttagcgtttagcgcaagcgcggcgcagtatgaagatggtaaacagtacactaccctggaaaaaccggtagctggcgcgccgcaagtgctggagtttttctctttcttctgcccgcactgctatcagtttgaagaagttctgcatatttctgataatgtgaagaaaaaactgccggaaggcgtgaagatgactaaataccacgtcaacttcatgggtggtgacctgggcaaagatctgactcaggcatgggctgtggcgatggcgctgggcgtggaagacaaagtgactgttccgctgtttgaaggcgtacagaaaacccagaccattcgttctgcttctgatatccgcgatgtatttatcaacgcaggtattaaaggtgaagagtacgacgcggcgtggaacagcttcgtggtgaaatctctggtcgctcagcaggaaaaagctgcagctgacgtgcaattgcgtggcgttccggcgatgtttgttaacggtaaatatcagctgaatccgcagggtatggataccagcaatatggatgtttttgttcagcagtatgctgatacagtgaaatatctgtccgagaaaaaataattcaatgtaaattacataaagcccgtgaatattcacgggctttttttattatttaataaatataaatacattctgataatgcatcctgccgctggacattatttcagcataagtggatattcaaagttttgctgttttatcagggaatatttatatgatacgtaagagtgctacaggtgttattgttgcgttagccgtaatctggggtggtggcacatggtacacaggtacgcaaattcagcctggtgtcgaaaaatttattaaagattttaacgatgctaaaaagaaaggtgaacatgcctacgatatgacgttaagttatcaaaattttgacaaaggcttttttaattcccgttttcaaatgcaaatgacattcgataacggtgcacccgatctcaatatcaagccaggccagaaagttgtatttgatgtggatgttgagcacggtccgttgcccatcacaatgttaatgcatggtaatgtcatcccagcactggcagcggcaaaagtgaacttagtgaataatgaactgacacaaccgctatttatcgccgcgaaaaataaaagccccgtggaagcgacattgcgattcgcgtttggtggcagtttctctacgacattagatgttgcccctgcagagtatggaaagttttcttttggtgagggccagtttacttttaatggtgatggtagtagtttgtctaacctggatattgaaggcaaagtcgaagatattgttctgcaattaagtccaatgaacaaagtaacggcaaaaagttttaccattgattctctggcgcgattagaagaaaagaaatttccggttggtgaaagcgagagcaaatttaatcagattaacattatcaatcacggggaagacgttgcccaaatcgatgctttcgttgcaaaaaccaggctggatcgcgttaaagacaaagattatatcaatgtcaatctcacctacgaacttgataagttaacaaaagggaatcagcaactcggtagtggtgagtggagtttgattgctgaatctattgatcccagtgcagtgcgccaatttatcatccagtataacattgcgatgcagaagcagcttgctgcacaccctgagttagcaaacgatgaagttgctctgcaagaagtgaatgctgcattgttcaaagagtatttaccgttattacaaaaaagtgagccgaccattaaacaaccggtaagatggaagaacgcactcggcgaactaaatgccaatctggatatcagtattgccgacccagccaaatctagtagttccacaaacaaagatatcaaaagcctcaattttgatgtgaagttaccgcttaatgtcgtcacagaaaccgcaaaacagcttaatttatctgaaggaatggatgcggaaaaagcgcaaaagcaggctgataaacaaatcagcgggatgatgacattaggtcagatgtttcagttaatcacgattgacaacaataccgccagcctgcagctgcgttatacaccgggtaaagttgtttttaacggacaggagatgagcgaagaagaatttatgtctcgtgccggacgttttgttcattaaaatactcactcgcctctgctcattcagaggcgagtaaaacttacttattctgacgctgactactcatgagagacgtcagaagccggtctttttcctgccacaaactgttcagccattgctgaaaatggcgcttaaagcttttgtcattgatgtagtcgccatgtaactcatcggcaataggctgtaaatccacatgtacgacaatccgcgtcagtttaccgcttaacatatcgaagaacggctgacggttattgtccggataacacagcgtaacattaagcagtttatcgaattgtttacccagtacatttagcgccatcgcaatgcctgccgcctttggtggcaacaagttttgaaaagtggagtgggtttgctgatgtttttcttgcgtgaaacgggagccttcaacgaaattgacaatggtggtgggatgcaggcgaaacttttcacaagaacgccgagtggtttcaacatctttaccacgtcgctccggatgacgtaataaataagcgcgggaataacgcttcataaacggcatatccaggctccagcacgccaggccaagaaatggcacccaggccagctgttgcttgaggaaatatttattcatcggaatgtgcttacgaaacagcacgcacagtacgacaacatctgcccaactacggtggttacaaataagcagataccagttcttcttacttaacccttccagcccgtgaacttcccattgaaggtgtgggttcagatgcagtaataccgccagaccttcacaccagcaatacatcataaaatcacaaaaacggctaacctttcgccaaatgactggcacaggtagcaatagttttacaatcccggcaatgatgatcgggacggaacaaaaaatagtgaccaaaatggtcaatacgatactcagcaaaagggttatcgcagcgagtattctcgtcataatgaatttattcaaaaggttagccatagacagtgcgctaaagaagcgcaaggcgcagattttagcagaaaacgacccaaataacggatgatccttaaggagaaaaataattcatatctatccacattagaaaaaatcccattatctcaattattagggatggatttatttttaactgcatgaaaaacaaagacaaacatcatgctgtaaaaagcatgataataaattaaaagcgatgtaaataatttatgcacaaagttatccacatgacgatttgcgagcgatccagaagatctacaaaagattttcacgaaaagcggtgaaaaactcatgttttcatcctgtctgtggcatcctttacccataatctgataaacaggcacggacattatggttcagatcccccaaaatccacttatccttgtagatggtagttcttatctttatcgcgcatatcacgcgtttcccccgctgactaacagcgcaggcgagccgaccggtgcgatgtatggtgtcctcaacatgctgcgcagtctgatcatgcaatataaaccgacgcatgcagcggtggtctttgacgccaagggaaaaacctttcgtgatgaactgtttgaacattacaaaagtcatcgcccgccaatgccggacgatctgcgtgcacaaatcgaacccttgcacgcgatggttaaagcgatgggactgccgctgctggcggtttctggcgtagaagcggacgacgttatcggtactctggcgcgcgaagccgaaaaagccgggcgtccggtgctgatcagcactggcgataaagatatggcgcagctggtgacgccaaatattacgcttatcaataccatgacgaataccatcctcggaccggaagaggtggtgaataagtacggcgtgccgccagaactgatcatcgatttcctggcgctgatgggtgactcctctgataacattcctggcgtaccgggcgtcggtgaaaaaaccgcgcaggcattgctgcaaggtcttggcggactggatacgctgtatgccgagccagaaaaaattgctgggttgagcttccgtggcgcgaaaacaatggcagcgaagctcgagcaaaacaaagaagttgcttatctcagttaccagctggcgacgattaaaaccgacgttgaactggagctgacctgtgaacaactggaagtgcagcaaccggcagcggaagagttgttggggctgttcaaaaagtatgagttcaaacgctggactgctgatgtcgaagcgggcaaatggttacaggccaaaggggcaaaaccagccgcgaagccacaggaaaccagtgttgcagacgaagcaccagaagtgacggcaacggtgatttcttatgacaactacgtcaccatccttgatgaagaaacactgaaagcgtggattgcgaagctggaaaaagcgccggtatttgcatttgataccgaaaccgacagccttgataacatctctgctaacctggtcgggctttcttttgctatcgagccaggcgtagcggcatatattccggttgctcatgattatcttgatgcgcccgatcaaatctctcgcgagcgtgcactcgagttgctaaaaccgctgctggaagatgaaaaggcgctgaaggtcgggcaaaacctgaaatacgatcgcggtattctggcgaactacggcattgaactgcgtgggattgcgtttgataccatgctggagtcctacattctcaatagcgttgccgggcgtcacgatatggacagcctcgcggaacgttggttgaagcacaaaaccatcacttttgaagagattgctggtaaaggcaaaaatcaactgacctttaaccagattgccctcgaagaagccggacgttacgccgccgaagatgcagatgtcaccttgcagttgcatctgaaaatgtggccggatctgcaaaaacacaaagggccgttgaacgtcttcgagaatatcgaaatgccgctggtgccggtgcttagtcgcattgaacgtaacggtgtgaagatcgatccgaaagtgctgcacaatcattctgaagagctcacccttcgtctggctgagctggaaaagaaagcgcatgaaattgcaggtgaggaatttaacctttcttccaccaagcagttacaaaccattctctttgaaaaacagggcattaaaccgctgaagaaaacgccgggtggcgcgccgagtacgagcgaagaggtactggaagaactggcgctggactatccgttgccaaaagtgattctggagtatcgtggtctggcgaagctgaaaagcacctacaccgacaagctgccgctgatgatcaacccgaaaaccgggcgtgtgcatacctcttatcaccaggcagtaactgcaacgggacgtttaagcagtaccgatcctaacctgcaaaacattccggtgcgtaacgaagaaggtcgtcgtatccgccaggcgtttattgcgccagaggattatgtgattgtcagtgcggactacagccagattgaactgcgcattatggcgcatcttagccgtgacaaaggcttgctgaccgcattcgcggaaggaaaagatatccaccgggcaacggcggcagaagtgtttggtttgccactggaaaccgtcaccagcgagcaacgccgtagcgcgaaagcgatcaactttggtctgatttatggcatgagtgctttcggtctggcgcggcaattgaacattccacgtaaagaagcgcagaagtacatggacctttacttcgaacgctaccctggcgtgctggagtatatggaacgcacccgtgctcaggcgaaagagcagggctacgttgaaacgctggacggacgccgtctgtatctgccggatatcaaatccagcaatggtgctcgtcgtgcagcggctgaacgtgcagccattaacgcgccaatgcagggaaccgccgccgacattatcaaacgggcgatgattgccgttgatgcgtggttacaggctgagcaaccgcgtgtacgtatgatcatgcaggtacacgatgaactggtatttgaagttcataaagatgatgttgatgccgtcgcgaagcagattcatcaactgatggaaaactgtacccgtctggatgtgccgttgctggtggaagtggggagtggcgaaaactgggatcaggcgcactaagattcgcctgaacatgccttttttcgtaagtaagcaacataagctgtcacgttttgtgatggctattagaaattcctatgcaacaactgaaaaaaaattacaaaaagtgctttctgaactgaacaaaaaagagtaaagttagtcgcgtagggtacagaggtaagatgttctatctttcagaccttttacttcacgtaatcggatttggctgaatattttagccgccccagtcagtaatgactggggcgttttttattgggcgaaagaaaagatccgtaatgcctgatgcgctatgtttatcaggccaacggtagaattgtaatctattgaatttacgggccggatacgccacatccggcacaagcattaaggcaagaaaattattcgccgtcctgcgtttcttctacaggctgcatctcgctaaaccaggtatccagtttctgccgcagcttgtccacgccttgtttcttcaagctagaaaacgtttcaacctgcacatcaccgttaaacgccagtacagcttcacgcaccatattcaattgcgctttacgtgcgccgcttgccagtttgtccgctttggtcagcagcaccagaacggcgatattgctgtctaccgcccactcaatcatctgctgatccaaatctttcagcggatggcgaatatccattagcaccaccagaccttgcaggctctgacgtttttcgaggtattcgccgagcgcacgctgccatttgcgcttcatctcttccgggacttccgcataaccgtacccaggcaagtcaaccagacgcttgccgtcagccacttcaaacaggttgataagctgggtgcgccctggggttttactggtacgagccaggcttttctggttagtcagcgtgttcagcgcgctggatttacctgcgttggaacggcctgcaaaagccacttcaattccggtatcggaaggtaggtggcgaatatcaggcgcactcatcacaaaatgcgtctgttgataattcaaattagtcaaagcggtcgtctccgtcagtcaaagctttgtggcgattatacctgaaccataataaaaggcggatttttcggcgtgagcgttgtaagtaaaagccatacgctttgtgagacattgccgatagtctttatgcgaaatagcagagaaaattctgcgatgcatgtcaaataagctatataaatcagtgaattgcttttatataaaactctgaaaatgtgcaaatactgatggcggttgattgtttgtttaaagcaaaggcgtaaagtagcacccatagagcgaggacgctaacaggaacaatgactcaggatgagggtcaggagcgccaggaggcgaagacagaggattgtcaggaagacaaacgtccggagacgtaattaaacggaaatggaatcaacacggattgttccggctaaaggaaaaacagggtgtgttggcggcctgcaaggattgtaagacccgttaagggttatgagtcaggaaaaaaggcgacagagtaatctgtcgccttttttctttgcttgctttctgttagattccgccgcaaatctatactgaataaaacggctaaaagacgaaccattatgaaaccaagttctagtaacagtcgcagcaaaggtcatgcaaaagcgcgtcgaaaaacacgcgaggagctggatcaggaagctcgtgatcgcaagcgtcagaaaaaacgtcgtggtcatgcgccgggcagccgcgcagcgggcggaaacaccacgagtggcagcaaaggccagaacgcaccaaaagatccacgtattggcagtaaaacccctattccattgggcgtgactgaaaaagtcaccaaacagcacaaaccgaagagtgagaaacctatgcttagtccgcaggcggagttggaattactggaaacggatgagcgtctggatgcgctgctggaacgtctggaagcaggcgaaaccctgagtgccgaagagcaatcctgggtggatgctaaactggatcgtattgatgagttgatgcagaaactcggcctctcttatgacgatgacgaagaagaggaagaagacgagaagcaagaagacatgatgcgtctgctgcggggcaactaacggattgccgccgtgggccttcccgttctgctgataacccttccggttatatgttatctggtgtggttattcgttaaactacagcggttgtcgcggcgacaaaagtggctgcgcaaccggctgatgacccgaaacgggcatccgccggtacgccgtagccgccagagacgccatcggaaggagtgagcatgtctgtacagcaaatcgactgggatctggccctgatccagaaatataactattccgggccacgatacaccagctacccgaccgcgctggagtttagtgaagacttcggcgaacaggcgtttttacaagccgtggcgcgctatcctgagcgtccattatctctctacgtacatatcccgttctgccataagctttgttacttctgcggttgcaataagattgttactcgccagcagcacaaggccgatcagtatctggacgcgctggagcaagaaatcgtccatcgtgcaccgctgttcgccgggcgtcacgtcagccaattgcactggggcggcggaacgccgacgtatctgaataaagcgcaaatcagccgcctgatgaagctgctgcgcgaaaacttccagttcaatgccgatgcggagattagcatcgaagtcgatccgcgggaaatcgaactggatgtactcgatcatttacgcgccgaaggctttaatcgcctgagcatgggcgtgcaggacttcaacaaagaagtgcaacgtctggttaaccgcgagcaggatgaagagttcatctttgcactgcttaaccatgcgcgtgagattggttttacctccaccaacatcgacctgatttacggcctgccgaaacagacgccggagagtttcgcctttaccctgaaacgtgtggcggagctgaaccccgatcgtctgagtgtctttaactacgcgcatctgccgaccatttttgctgctcagcgcaaaatcaaagatgctgacctgccgagtccgcagcaaaaactcgatatcctgcaggaaaccatcgccttcctgacgcaaagcggctatcagtttatcggtatggatcactttgcccgtccggatgacgagctggcggtggcccagcgtgaaggcgtgctgcatcgtaacttccagggctacaccactcagggcgataccgatctgctggggatgggcgtttccgccatcagcatgattggcgactgctacgcgcagaaccagaaagagttgaagcagtactatcagcaagtggatgaacaaggcaatgcgctgtggcgtggtattgcgctaacgcgtgatgactgtattcgccgcgatgtgattaagagcctcatctgcaacttccgtctggattacgcccctattgagaaacagtgggatttgcacttcgctgattactttgcggaagatctcaagctgctcgccccgttagcaaaagatgggctggtggatgtggatgagaagggaatacaggtgacggcgaaaggtcgcttgctgatccgcaacatttgcatgtgctttgatacctatctgcgccagaaagcgcggatgcagcagttctctcgggtgatttaaatagtgaatggcgcttcgtttacaaagtagaaaacgaaagcgccatcaatgtgctgagaacaagattgcctgatgcgctgggcaacaaaacctgttgaaattattgcttttgtaggccggataaggcgtttacgccgcatcaggcatctgagcatgatgcctgatgcggcgctggtcgcgtcttatcaggcctacgactttctccgcatccggcataaacaacgagcttcagctaaacagcccaatcattgcggcacacagcacggcagcaacggcagtttgcggtgtgtggctgtcaactgcgccactcgataccagattaattattgattccagcataatgactctccccgttttccgggcaagatcatactgaacttatcggaacagtaaagcgtaaaataccagcaatttgcgctcaataatcaatctttacacacaagctgtgaatcactccatccccagctcttttaacttacgcgtcagggtgttgcggccccagccgagtagccgcgccgcttcctgtttatgcccctgcgtatgtcgcaacgcggtcgtcagtaacgtccgctccagctctggctgcgcttcggaaagcagattttgatgaccggaacgcagcgctctgtctgcccactgcgcaagaagcgtcgcccagctgtccggttgcatttggctagtactctccgcaaccgtactttcaaacagttcgccgggcaaatcctgaatcaacacttcctgcccggcggccatcaccgttagccagcggcaggtgttttccagctggcgcacgttgcctggccacgccagacgcgtcagagcagcttcggtttccggatgcagtaacttcgcttctacgcccagttcgcgcgcggcaacctgtaaaaaatggcgcgccagacggggaatatcttcccgacgttcgcgcagcggcggcagatgaacgcggataacgttcaggcggtggaacagatcctcacggaacttaccttcctgcactcgctgttcgagattctggtgagtggcagcgataatccgcacatccactttcaccggcgcatagccgccaacgcggtaaaactgaccgtctgccagcacgcgcagcaaacgcgtctgcacatccagcggcatatcaccaatttcgtcgaggaataatgtaccgccatcggcctgttcaaaacgcccctgacgaatggtattcgcgccagtaaacgcgcctttctcgtggccaaacagttcactttcgatcaaatcttttgggatagctgccatattcagcgcgataaacggcgctttggcgcgcggactgtggcgatgcagggcatgagcgaccagttctttaccggtgccggattcgccgttaatcagcacgctaatagaagaacggctaagccgaccgataatacggaacacgtcctgcatggctggcgcttcgccgatgatatcggtcgttgggccgttaagctgaacattacgcggctgctgctgttcctggtaatgactgatagcgcgctcaaccagcgccactgcttcgtcgatatcaaacggtttgggcagataatcaaacgccccttgttgataggcgctgacggcagcatccagatcggaatgtgcggtcataatgatgaccggaagcattggatggcgctgtttaatctgcttgagcagcgccagcccgtccattcccggcatacggatatcactaagcagcacatccggcgttttgctcgccagcgcctccagcacttctgcgccgttctcaaacgtcgtacaggttaaacctgccccagcgagcgcacgttcaagcacccaacggatggaactatcgtcatcgactacccagactatccctcgttgcataaacgtcacctttatttcctgataggcaggtaaacgctgaactcggtatgccctggccaactggtaaattcaattttgccactatgctgatcaatcaaattacgagcgatggataagccaagcccggtgccaccttcgcggccgctgaccatcgggtaaaacagcgtatcctgcaaatgaggcggaatgcccggcccgttatcttccacatcaatccgcgccgccagccggtagcgctcgccgtgtaaggtcagttgaaacgcggtgcgggtacgcagaatgatttcaccgccttccggccccagcgcctgtagcgcattgcgcacaatattcagcaagacctgttcaatttgatccgggtcgtgcgccagttccggtaggctgggatcgtaatcacgaatcaaccgcacgttgtccggcagttccatgctcaccagcgttaccacgcgttcagccactttgtgaatactttcggtaacgcgcgtaccgggcagctgcggccccaacagacggtcgaccagatttcgcagccggtccgcctgttcgataatcactttggtatattcgagtagacttgggtcaggtaacgctttgctgagcagctgcgccgcgccacgtaaaccgccaagcggatttttaatctcatgtgccaggccgcgcactaaatcacgggcagcaacctgctgggcgtgctgtagctgttcctgacttaagcggcgctggttatccatcggagccatctccagcaggatcatgccgtccggcatacgctgggccgtcacagaaaggatatggctgcgcccgtcgatgaccagcgtcacttcgttatcggtaaaaccttgccccgcctccagactttcttgcatcagctcgatatttaaactgaagtagctcaacagttccggtaacggtgtaccaaacaatttgcgggagctttgggcgagcagttgttgcgcggcagggttggcgtaatggatcgccaggttgtcatcgattaacaaaatactgttaatcaggctgttgaggatctgcccagcatcgggctgcgtgcctgttgccataaagcagtctcctgaacaggttgcaccattttagtgcattatagctttttacggataaaaagcgcgaagcatcagagaattgacggagaaaaaagcccatgcagagatgggctacagatagctgacaaacttcacgttggagagcgactcacctgctccggcctaccacatcatcaccgtgtaggccggataagacgcatttgcgtcgcatccggcgtgatgtgcttgccaccgatcccaggcctgccagagacaggcgaaaagtttccacggcaactaaaacacttagacgctgtagtacagctcaaactctaccggatgcggagtcatacgcacgcggtcatcttcttcgcgacgcagagcgatgtacgcatcaattgcttcgtcagtgaacacgccaccggctttcaggaactcgcggtccagatccagttcgttcagtgcttcttccagagagcctgcaacctgtgggatctctttcgcttcttctggcggcaggtcatacaggtttttgtccatggcttcgcccggatggatcttgttcttgataccatcaagaccggccatcagcagggcagcaaagcacaggtacgggttagctgccggatccgggaaacgtacttcgatacgacgtgctttcggagaagaaaccaccggaatacggatagacgcagaacggttacgcgcagagtaagccagcattaccggtgcttcatagcccgggaccagacgcttataagagttggtggtcgggtttgccagggcgttaatcgctttagcgtgtttgattacgccgccaatgtagtacagcgcctgctcagacagacctgcgtatttgtcgcctgcgaacaggttaacgccgtttttagacagagacatgtggcagtgcataccggagccgttatcaccgaacatcggttttggcataaaggtcgcggttttaccgaagcggtgcgctacgttgtgcacaacatatttgtagatctgaatttcgtcagcttttttggtcatggtattgaagcgggtagccacttcgttctgaccagcagtcgctacttcgtggtgatgggcttcaaccaccagacccatctgttccatcaccagacacatttcagaacgaatatcctgagcgctgtctaccggtggaaccgggaagtaaccgcctttcactgccggacggtgacctttgttaccaccttcgtattgggtggaggagttccatgcgccttcgatatcgtcgatagcaacgtgggaaccggagatagaacttccgaaacggatgtcatcgaacaggaagaattcaggttctggcccgaacagtacggtgtcggcaatgccagtggaacgcaggtaatcttcggcgcgcttcgcaatggagcgcgggtcacggtcatagccttgcagggtgccaggttcaaggatgtcgcaacggataatcagggtggagtcggcgaagaacgggtcaatcactgcggtggatgcgtctggcatcagcaccatgtcggactcgttaatgcctttccagccgccaatgctggagccgtcaaacattttgccttcttcgaagaattcagcattcacctgatgagcagggatagtgacgtgctgttctttacctttagtatcggtgaagcgcaaatcaacaaacttcacttcgtgctcgttcagcatcgtcagtacgtgttcagcggacatactttaactctcctggattggtcatggtcgtcgtggtaacgaaatctgcaattattttggccgtgtcgccgtaaaaaagataaagcgaaatctgtgccaacttttaaattgcccctaaaaggcgttatcatgcgcaccatcgtgcaaaagggctgcaccacgatgtgaatgttgcaccaatatagtgcttcaatggaaacattaagcaccatgttggtgcaatgacctttggataaccctttttatgctccgtgaaagcgatcacaaagggactctgcaatacttgtttgcggaggatgtttgtgatcctgttttgtagtgcgattaatccgtgtacaataacgcgctatttctaatgcctgaggcaaagttgtgatcgaaaaattgcgtaatatcgccatcatcgcgcacgtagaccatggtaaaaccaccctggtagacaagctgctccaacaatccggtacgttcgactctcgtgccgaaacccaagagcgcgtgatggactccaacgatttggagaaagagcgtgggattaccatcctcgcgaaaaacaccgctatcaaatggaatgattaccgtatcaacatcgttgataccccggggcacgccgacttcggtggtgaagttgaacgtgtaatgtccatggtagacagtgtgctgctggtggttgacgcatttgacggcccgatgccgcaaacgcgcttcgtaaccaaaaaagcgtttgcttacggcctgaagccgattgttgttatcaacaaagttgaccgccctggcgcgcgtcctgattgggttgtggatcaggtattcgatctgttcgttaacctcgacgcgaccgacgagcagctggacttcccgatcgtttacgcttctgcgctgaacggtatcgcgggtctggaccacgaagatatggcggaagacatgaccccgctgtaccaggcgattgttgaccacgttcctgcgccggacgttgaccttgacggtccgttccagatgcagatttctcagctcgattacaacagctatgttggcgttatcggcattggccgcatcaagcgcggtaaagtgaagccgaaccagcaggtcactatcatcgatagcgaaggcaaaacccgcaacgcgaaagtcggtaaagtgctgggccacctcggtctggaacgtatcgaaaccgatctggcggaagctggcgatatcgttgcgatcacgggccttggcgaactgaacatttctgacaccgtttgcgacacgcaaaacgttgaagcgctgccggcactctccgttgatgagccgaccgtttctatgttcttctgcgttaacaccagcccgttctgcggtaaagaaggtaagttcgtaacgtctcgtcagatcctggatcgtctgaacaaagaactggtacacaacgttgcgctgcgcgtagaagaaaccgaagacgccgatgcgttccgcgtttctggtcgtggcgaactgcacctgtctgttctgatcgaaaacatgcgtcgtgaaggtttcgaactggcggtatcccgtccgaaagttatcttccgtgaaatcgacggtcgtaaacaagagccgtatgaaaacgtgactctggacgttgaagaacagcatcagggttctgtaatgcaggcgctgggcgaacgtaaaggcgacctgaaaaacatgaatccagacggtaaaggccgcgtacgtctcgactacgtgatcccaagccgtggtctgattggcttccgttctgagttcatgaccatgacttccggtactggtctgctgtactccaccttcagccactacgacgacgtacgtccgggtgaagtgggtcagcgtcagaacggcgtactgatctctaacggtcagggtaaagcggtcgcgttcgcgctgttcggtctgcaggatcgcggtaagctgttcctcggtcacggtgcagaagtttacgaaggtcagattatcggtattcatagccgctctaacgacctgactgtaaactgcctgaccggtaagaaactgaccaacatgcgtgcttccggtactgacgaagccgttgttctggttccgcctatccgcatgactctggaacaagctctggagttcatcgatgatgacgaactggtagaagtgactccgacctctatccgtattcgtaaacgtcacctgacggaaaacgatcgtcgccgcgccaaccgcgcaccgaaagacgattaatttcgttttttagtcataaaaaacctgccagcgatggcaggtttttttttgcctgtcgtgagcgcacaccaatgcgagtatctcccttataagtctgtggttacgtcaatagagagctttgtcacaattatctgcaaagtcatacgccgttaattgctttcttttttggcgtaagcgtaagatgcttcatctggtttaaaccaaaaggattaaacaatggcggagaatcaatccaccgtagaaaatgcaaaagagaaactggatcggtggttgaaagatggcatcaccacgccgggtggaaaactccctagtgaaagagagctgggagaactgctgggcattaaacgtatgacgctgcgccaggcgttgttgaacctcgaggcagaatccaaaatcttccgtaaggatcgtaaggggtggttcgtgacccagccgcgatttaattacagtccggagctgagcgcgagctttcagcgggccgcaattgagcaagggcgagagccttcctgggggtttaccgagaaaaaccgtaccagcgatattcccgagacgctcgcgccactgattgcagtgacgccaagtactgaactctatcgcatcaccggctggggggcgctggaaggacataaagttttctatcacgaaacatatattaatcctgaagttgctccgggctttattgaacaacttgaaaaccacagtttttctgcagtctgggaaaagtgctaccaaaaagagacggtagtaaaaaaattgattttcaaacccgtcagaatgccgggcgatatcagcaagtatcttggcggttctgcgggtatgccagcgatcttaattgaaaagcatcgcgccgaccagcaaggcaatattgtccaaatagatattgaatattggcgatttgaggccgtagacctcatcattaatctgtaagtgttttatggtgacaataaataacgcaagaaagattctacaacgtgtcgacactcttcctctttatttacatgcttatgcctttcatttaaatatgcggctggaaagagtgttgcctgctgatttacttgatatcgcaagtgaaaataatctacgtggcgtcaaaatccatgttctcgatggcgagcgtttttctcttggtaatatggacgataaagaactctctgcctttggggataaagcccgccgtctgaaccttgatattcatattgaaaccagcgccagtgataaggcatctattgacgaagccgtcgccatcgcgttgaaaactggggcaagctccgtacgtttttatccacgttatgaaggtaatttgcgcgacgtattaagcattatcgctaacgacattgcctatgtacgggaaacgtatcaggacagcggcctgacttttacgatcgagcagcatgaagatttaaaaagtcatgagctggtgagcctggtcaaagaaagtgagatggaatctctttccttactgtttgattttgcgaacatgatcaatgcaaatgagcatcccatcgacgctttaaaaacgatggcaccgcatattacccaggtccatatcaaagatgccttgatcgttaaagaaccgggtggcctgggtcataaagcctgtattagtggtcagggtgatatgccgttcaaagcgttattaacgcaccttatctgcctgggtgatgatgagccgcaggtgacggcatatggcctggaagaagaggttgattactatgcgccggcgttccgctttgaagacgaagatgataatccgtggatcccttatcgccagatgagtgaaacaccattgccagaaaatcatttactggatgcgcggttacgtaaagaaaaagaagatgcaattaatcagataaatcatgtgcgtaacgtactacaacaaatcaaacaagaggcaaaccatcttctgaaccactaataagttttaactcatacgcagttaataaaaccattccatatgaatggtcggtatcttattgcctttaaaacagtgattttaaaaatcgcttaggggatgttatgctcacgaaaaagaaatgggcgttatttagtctattaacactgtgtggcggtacaatttataaattaccgagcctgaaagatgcgttttatatcccgatgcaggaatatttccatttgaccaatggtcaaattggtaatgctatgagcgtaaacagttttgtcaccacagtgggcttttttctgtctatttattttgccgataaactaccgcgcagatacaccatgagtttcagtctcattgcgacaggattactgggtgtttatttgacgacaatgccggggtattggggcatcctctttgtctgggcgctatttggcgttacttgcgacatgatgaactggccggtcttgctcaagagcgtaagtcgattgggcaatagcgaacaacaaggtcggttgtttggcttcttcgaaacagggcgtggcattgtcgataccgtggtggcattttctgcgttggcagtatttacctggtttggcagtggcttattaggttttaaagcaggcatctggttctattcccttattgtgattgccgtaggcattattattttctttgtcctgaatgacaaagaagaggcaccgtccgttgaggtgaaaaaagaagacggagcaagcaaaaacaccagtatgaccagcgtgctgaaagacaaaactatctggcttatcgcttttaacgtcttcttcgtttacgcggtttactgtggcctgacattcttcattccattcctgaaaaacatctatctattgcccgttgcgctggtgggggcttacggcatcattaaccaatactgtctgaaaatgattggtggaccgattggtggcatgattagtgataagatcctgaaaagcccaagtaaatatctatgctacacctttatcattagtaccgctgcgctcgtactgttgattatgctgccgcacgaaagtatgccggtctatttagggatggcatgtacgctgggctttggcgcgatagtctttacacagcgagccgtattttttgcacctatcggcgaagcaaaaattgctgaaaataaaacaggtgcggcgatggcgttgggtagctttattggttacgctccggcgatgttctgcttcagtctgtatggctacattctggatttaaatccggggattattggctacaaaatcgtgtttggcattatggcctgcttcgcattcagtggtgcggtggtttccgtaatgctggttaagcgtattagccaacgtaagaaagagatgctggcggctgaagcttaattaatggccggatgtgcttaatccggccaacgaaaaccgtatcaaccgtaggccggataaggcgtttacgccgcatccggcagtttcacatcagaagaaatacttcgtcccgatacggatctggttttgctcgcggtggtacggttcgacgttgcggtctaaccagcgcaattcgaaataagggagccagtgttcattaatacggtaacggaaggtgttagtgatttcccaatgatgatctttcccgttgctactattaaagtcattcactcgcatgaagtaatgtggctcaaatgtataggaaaatttatcggtgattttaaaattccagtaggtgccaatttcataggtgtcattattatccagttccccgctcaaatctgtactactatagttattatggttatagcgatttcgtactgtcagattaaaccatggtacaaatttatagttgacgtccagatacactgcaccaccgctaccgatactcttatcattaattaagccaccgggctggatggttaatttatcggttggtttaaataacggataccagccttcaatttcgttatatccatgttttagttcatcttctcgctgaaagttgtaggtattggttaacataatacccgcgcccatatcgaagttataacccacacgtagcataacctcgccctgatcggaggcaagattatatgcctccctgttttcgacgtatgcgccagcaaatacgctggcagaggtcagagaagataataaaattattgcattaatctttttcataataagtccattttttaaacgtagggaggccgccacccaccaggatggaaatagcggctattgacatttataacgttacggaagccgttttttcttctgtcgccatctctttatttttgcgttggttgatttcctcaataatcaatgcaaaccgtttttcattgagtgtgtaaaagaatcccatcgtcaatgcagcaataattgccagtgcacaaggccagataaaaatgagctgacgcaaaccctgtaatgtcgcatcgctttgcgcgatgttgggaacataaccaatttgcgtcagcataatgcctggcaagaagccagcaagtgcggcagaaattttacgaaagaaggtataaccggtataaacagaaccttcggcacgaataccggttttccattcaccgtaatctacggtatctggtaccagtgcccagttcaggctgtttacaaaggccgtgccaaaaaaggcgacacaagagaacatgacgaaagtgaaagagttacttccccagaaataattcagtatatcacccaccgcccacagcaccatgccagccagataaacctgttttttaccaaaacattttacagttaatggcaccagtaatacgccgatgaggatgcatcccatactgaagaatcccatccagctcaataaattaatatcattcagcacatactgggtgtaatagacctgaatcgccagtttgatattaaatgccgccagggtacacaagttagcaatgcataaaaccagcaatggcggattccgaaatatcgcgcaaaaacttttgagaatactggctttatgtccggttggcgttgtgtccacataatgctctttgacgcctctgtagcacagcatcataaaaataaagccgccaatggagaacataagtgccgcacaggcataaccgacggtactgtcagaaaaaaggctctgcaacggaataaacgccacggtacaaatcaatagccctatggttgcaccaccctggcggtaagccgcgagctgcgcgcgctcattcgggtttttggtaattgccgggatcatcgcaccatagctgcagttcatcagactgtaactaagtccaaacatcataaacagcgcggtggcaatcgtcgttttaaccggcaaacaaaaggtggtggcgataaactggagcgttgcaattaacgccgccggaaccgctgcatataaaataaagggacgaaatttgcctttaggcccaatatttttccggctgtcgagtaaaaatccggtgagcatatcggtaaacgcggtaaaaaacttcgccaccagaaagataatcccgccatagtaagcaggcatccctaattcatcggtataaaatttgaggagatacagagtaccgatgcagagcattaaattgctaccgacgtcgcccataccataggcgattttttcccgcagattcagttttaatgtcagtggattatggtcagacataatcactccttataacgccccgcagggcgtcgtttattattattacgccgtgcgtttacgggcttctatctcttccacaatgcggacatacatcttctcgttcaggctgtagaagcaacccatcgccacaatggtgactaccgccagtgcgcttgggtagatgaagatcaactggcgtaacccttcaatggtgtggtcagcctgtgcgacgttcggcacatagccaatttgcgtcagcatccagccggggaagaaaccagccagcgcctgagacactttgcgaaagaaggtaaaaccggtgtagaccgttccttcgctacgcacgccggtgcgccactcgccgtactcgacggtgtcggaaaccagcgcccagttcaggctgttaacaaacgcactgccaaagaacgccaggcaggagaacgccacgaagctgacgctaccgccgccgaagaaatagttgagcagatcgcccagcacccaaatcagcaggccgccgatataaactttcttcttgccaaaacgtctgacactggcaggcatcaggaatacgccgatgaaaatacagcccatgctgaaaaatcccatatagctcaacaggatgggatcgttaagcacgtactgggtgtaatagacctggatggcgagcttgacgttaaacgcccctaaagtgcagaggttggcaatgcacagaatgaacagcgggcggttacccgcaattgcgcggaaagattgcagcaggcccggcttttgcgccggattagcaggctgggtttcgacataacgctctttcacgccgctgtagcagatccacataaacagcaggccaaacagactaaacagcgtggcggcgaagatatagccaagttgctgattaccttcgataagattcataactggcacgaatcccaccgtgcacagcagcaggcccagcgtagcgccgccctgacgccatgccgccagactggcgcgttcgttggggtttttggtgatagcgggaaccattgcgccgtaggagcagttcatcatgctgaaaaacagtccgtaaagcataaacagaatagtggccatcaccgttttaccggtgacatcaaacggtgtgccgacaaagttggcgatcgccagtaaggtgaccgggaaactcgcatacagaataaaaggacggaacttaccttttggaccgatcttgcgtcgggaatccaacataatgccggtacccatatcggtaaacgcagtaaagaatttactaatcaaaaagataatgccgccataggtgcctggcagccccagaacgtcggtataaaacttcaaaagataaagcgtaccgatatccagcaggatgttagaggccaggtcgccaataccgtaagagagtttctctttaaagggcaggcgtaaagttgctggatcttccgttgtgatgtgactcatgcttgttctccctttgcccatgagtttccccacgggcggatgtgattagatgctttttaagctcgcgaacagtgccgcccattcgctatcggcgcgataaaagaccggcggcttgccgatgggcgcattaacggtaacttccccgccccggaacgcttcacccgtccaggcgtggacccagttatcctccggcagatagagcgtccagtcgctacggccttcttcatgcaccggagcgaccagaatgtcgcgacctaacaggtactgatatttcagggtgtaagtgtgcgcatcgtcttcgtaatgcaggaacagcgggcgcataaccggcaggccggacttcgcattcagcgcgacggcctctttcaggtaaggtttcagggtggtgaagacggtggtcatacgggcgaaatgggcgatggtttctgcgtcgccgtcaaactgccagttgtcgccaggacggttaccttcgtgggtgcgcatcatcggcgtgaaggcgctgaaatcgcaccagcgcagcagcagctctttgctgcgcttcatctcaaacagggtggtgtaaccgccaatgtcgctgtggtgcaggccatgtccggtcattgccaggctcagcgccgccgggacaacgctcgccaggccatcgtcgagactccagtcgacgttctggtcgcccgcccacatcatggtggagtatttctggctaccggtagaaccggcgcgcataaagaaaaggatctcgccgagcttgcccgtttcttcaagggcttcgtagttacacttcgcccacagcgcaggccaggcgttatgcataatttcggcactgacgccgttatgcaagtacgtgtcggtgggcagatactcgccgaagtcagccatccagccgccgcagccgagttcaatcatgttctttttgatcacttccttgaaccaggcgtaggcttctggattagtgagatcgacaacgccgccgtaaaactcgccaaactccaccagatagtcaccgccagaggcatcttttgccagatagccgtgttgtgccgcttcttcgcagagatctttatcgctggcaacatacgggttgatataggccaggaactgcacgccctcctgattccactgcttaatgcgactatccagttgcgggtagttttcgctgttccacttccagttccacatcacgcgtttgccaaaagaggtcatacgaataccggaccagtcctgcgcccagatgccgttgaccttcacgcccgcgttacgcatggtgtccagtttcttctggcacacttccgtcccgccctgaatgccgagcgttactccgtcataaatccagtcgggcagttctggctggcgtcccagcagggcggttaatttttccagcagggaaatgtatgtgtcagcacattcaaaacgcagcgttgctttgtcttcccacagcgccagttcatggtattccggggcactaaagtcgaagttcatatagcaactgttatcaacatggcagtaatacttctgcgtgctgacaaacgtaggctgtgggaagaaagtccagtaatagtcgccgcccgcattttctttgcagtcggcctgccaggtgacataggtttgtttgttgcgaccaacgccttgttcactggtccatagcgggaacggtttgccacgcagatcgaagtaggaaaactgttcgccgcagccgtagatatggtcctctggttgagcggcaaggcgcagccagatacggttgtggttaaggttgtcgttttgtagttccagcaataaacgcccctgatcgtcggcagagatattcagcgtggcgctaatgtcagaaccacggctgaaatgaattaaccaaccatccggactctggctgacgatggcgtcggtaagcgcaattttctcctgtagtttatctttaatgctgaaattaccgcggaacatatcgatatccgctataccactgccaatccataaacaaggattatctttgctatgggttaaaataagacgttgttgaaaatgtagggtaaaactgtcgttattctgatgaaattgaaaatctaataactgtggacgtggcgtatccataactaatctccatagagttgagaacgagattgttgccttcctgttattacaggcttatgtaaaatgattctcataaaactgatatataaaaactttacagaagctgagctgtttttaacttaataaattgaagatacataatgttgcctttagcgagtgaaatgttcttcaatgattttgactgctaatcaatacaagttattttctctgtccgtaaatattaaaaaacaggcggtgcggttttccactttccagtaataataagtcgataccactattaaaggcgttaggcgggcaactcataggttcaactgccagtccctgacgctgtaatttttcaccgctataaacctgcacccagagttgatcggaacaaaggcttacgctaagcgcctgctgtggatgggtaatggtcatttcccacaaatcattagcggttttaaaggtgtggtcgatttttgtcgcggctatttttttcgcctgcgtgaaatttaaatccagctcatcaacgtggtgaagcgttgtcggattcgcgtgctcatcgacggcataaacctggtttgccggaagctggaacagatattcatcaacagatgttaagttgcaggttaaataaggatgaatacccacgccataaggcgctgcgacagtgccgatattctggcttgcgatctcaacggaaagacccgtgtgtgcgttgaggctataaacaacttgactagccagcataaacggatagccgtaactgggcggcagaaaagctgtcagggtaacgctggtggcggttaattcactaatttgccagtctcgccaggcaagcagcccgtgaatagcggctttactactatgttcattaatgggtaactgatattcctgcccctgatagcggtaacagccgttggcgatccggttcggccacggaataagcactttacccagatgcgccagcggcatctcttcgggtttgtgcgggatgactaaatgacaaccctgaaaggttaattcagccagaccagcaccgacggtcacaatggtcgcgtgataatcccccgcggcaagactaacggtctgtccactgcaatgcatattggtgatttgcatacaaggcaccttaattaagctcatacagcctcccgtgaggctgatgtcaaacccaaaaactgcaccggacggtcccctcgcccctttggggagagggttagggagaggggaaaacccgcaccctattttcagatcagttatttcgcattaatatccagcagacccgctgcaaccgctggagccatgccgggcgctaacgggatacgcgggatcaccaggcaatgcagcaggtgataaatatcctgtttgccgtcccagactttggtggtgaccttattgtccgcatccagctcctgccaccaggaaccattttcatagtccatcaggtacttaatgcagtactcccaccatgtttgataccaggtttcatactggcgatcgccagtgacggtgtagagcgcgtaggccgtacccattgcttcgacgataggccaacgtacacgttcgcggaccaccggttttccttcccagtcaacggtataaacaatcccgtccgcgccatcgggtgcccaggcatcgcgcacggtggcgttaaacagacctttggcatcttctagcagccatgctggtggttgttcgcaacgggcttccagggcagcatggatgtgcagcattaaacggccccattcgatccagtggcctggtgtacctccgaacgcgcggaagcgatgcgccgggttatctttgttgtaatccggcagcggattccactgggtatcgaagtgttcgttaacgcgataatgattatttctggcgacgtcgtggataatcacggaagccacgcgaatcgcgcgatccagccattttttgtcgtgagtgacgtcataaacaatcaagaaagcttccaccgcgtgcatattggcattgccgccgcggtactcttcggttttgctgaaggcttcgtcccaggattccaggcacatctgctcttcttcgctccagaaatatttctcgataatttcaatggtgtaatcgagcagcttgcgcgcttccgggtgacccgttgtgacggcgctggcggcacccagcagagcaaagaagtgttgatagccctgtttggaggcatccaccacgccctcgtcattcacgcaggcataccagccgccatattttttatcacgcagtgcgccgttcatggctttgataccgtgatcaaccaagctgtaagcgccaggtcgacccatcgccgcagcaacggaataaacgtgcaacatacgagcggtgatccacagatgggtgcccatctcttctttgatttgccctttattgcctaaccagccaaaaccagtcggcactacggaatttttaccaaaatcaaagatgcggtcggtttcctgttccagccaacggttgtggcttagggtgttaaaccatttcattccttttatcctcatcttagcggcgtttagccatcatttcgtcgacgatatcgccaagttgttgtaatttcggtgcgcaaacgtcacgcagcatcagctcgttgtctggtaaaccgacgacgcttgcccagactgcacggcctgccaggaatccgcttgcgcccgccgtcattgccacgcgtacggcacgcgggaacagtttttcgtcgacaccggaagagaggatcacccatggcatattgatatggtcattcagacgttgactagcacagagaagctcttgttgcggacctttgccataaagcggcatttcaactttgtagaggtcagcgccactgtcgcccagctctttggcggcatcgatgatcgcttgttcgcgatcgaatttatcgccacgacgcggtgggcggacgactggctcaatgatgcttaccagaccgtgactgtggcacagttcgttgaactctttcaccatatccagacgttgctgcgcatcttcatcactacgccacagcaccagcagttttaaggctttgccaccgtcttgtttgatctgtagcggattgattttgcggtcaataaccacgctatcgaccggaataccgttgccaggaatgaactcatcggcggcgacaatcatggcgcaacttttggcaatcgcgttttgctcaaccacctggcggtagcagaattgttgatctaccagaatcgcgctggcataagggctgagggcctttgcagcgttaactttgaaatcagttaaaacgctatcggctaccggagcgggtgccccagccgcggcaaacatcatgcgcatggcttcgcgctgatcgaccgccagcatggcaaaaccgccgcttgcgcgcgtaatgtcgttgatggtgtacttattcattcatttattcctttatccagtcgttacatttttactttggcagtcatcccggcactgacacggacctgttccagaatggcggaccagtcctggcgaccgcgacccgctgcgcgcgcctggctataaacctcccgactggcggcccccagcggcattggcacatgcagctggttggcgacatcaagggcgatgccaagatccttatgggcaagatcgatcatgaaggcgggagaaagatctccgctgaggactttgtttggccaggaagtggtgaagtgacctttaccggcggcggtaccgctcatcactttgacggcaacatcgaagggaagattcagggcttcgcacaaaacggcggcttctgcgctaagcgcattgagcgcgatgctcatgtagttgttgatgagcttaacgcggatccccatgcccggaccgccagcgttgatcaactcactgcccatcgccatcaggatcggtgtggcacgttcaacttgttcagcggtgccgccagccagcagtaacagagtaccggtaatggcatttgcagaagtacggcctaccggaacatccatcatgctgaagcctttggcttgcatatcggcaatcaatttatcggtttgcagcggatggatggtggacatatcaatgaccagcgcatcggtagataagccttcgcaaacgccgttttcaccgaacaacacgttgcgcaccagatcgccattcggcaacatggtaatgataaattcggcatctttagcggcctgcgccgggttggcggcgggagtcgcacctttgtctaccagatgccgcacagcttcggcgttcacatcaaagacgcgaagttgatgcccttgctgcaataaattgctcgccattgggctacccatttgtcctaaaccgataaacgcgattgctgccataaccctctcctgaatacagttatgtcactttttgtcatttatgacatgctttgcttgtctgtttttgatcgtatttgtaatttatcgtcaaaaaattgacagccgtcactttttaaacaattggtgaaattaaaatgaacgcatcccaaaatgtttaaggaatgaccatgattcgtgttgcttgtgtaggtataaccgtgatggatcgcatctattacgtggaagggttaccgacggagagcggtaaatacgtggcgagaaattatacggaagttggtggcgggccagcggcgacggcagcggttgcggcggcaaggctgggggcgcaggtcgattttattggtcgcgtaggtgatgacgacacgggcaacagcctgctggcagagctggaatcctggggcgttaacacccgttacaccaaacggtataaccaggcgaaatctagccaatccgccatcatggtggataccaaaggcgagcggataatcattaactaccccagcccggatctgctgcctgacgcagagtggttggaggaaattgatttctctcagtgggatgttgtgctggcagatgtacgctggcacgacggcgctaaaaaagccttcaccctggcccgtcaggcgggtgtgatgaccgttctggacggggacattacgccgcaggatatcagtgagctggtggcattaagcgatcacgcggcctttagtgaaccgggtctggcgcgcttaacgggcgtgaaagagatggccagtgcgctaaaacaggcacaaacgctcacaaatggtcatgtctatgtgacccagggtagcgcaggctgcgactggctggaaaatggtgggcgtcagcatcaaccggccttcaaagttgatgtggtagataccacaggtgcgggtgatgtttttcacggcgctttggcggtggcgctggcaacaagtggggatttagcggagagtgtccgcttcgccagcggtgtagcggcgttaaaatgcacacgtcccggtggacgagccgggatccctgactgtgatcaaacccgatcttttttgagtctttttgtataaaatgccagggtgatggtttttcgaggaattttcatgagccttaccgaactaaccggtaacccgcggcacgaccaactcctcatgctgatcgccgagcgtgggtatatgaatattgatgagctggcaaatctgctggatgtctccacgcagacggtccgccgggatattcgtaaattaagcgagcaaggcctgattacgcgccatcacggtggcgcgggtcgggcttccagcgtcgttaatacggcgttcgagcagcgtgaggttagccaaaccgaggaaaaaaagcgattgccgaagcggtggcagactatattcctgatggtagtacaatatttatcaccattggtacgactgttgagcatgttgcccgggcgttacttaaccataatcatttgcggataatcaccaacagcctgcgtgtggcgcatattctttaccacaacccgcgctttgaagtgatggtgcccggcggtacgttgcgctctcataatagcgggatcattggccctagtgcggcgtcctttgtggctgattttcgtgctgattatctggtaacaagcgttggggcgattgagagcgatggcgcgttgatggagtttgatgtaaacgaagctaacgtggtgaaaacgatgatggcgcacgcgagaaatattctgctggtcgccgatcacactaagtatcatgctagcgcggcggttgaaattggtaacgtggcacaggtcactgcgctctttaccgacgagctgccgcccgctgcgctaaaaagtcgcttacaagacagccaaattgaaatcattcttccccaggaagacgcgtaaatttttgtgaccgttaacctggcttcataccttgccacatagccaaacccatcctttcccgctacagttaatttcttgtggcgcgaaaggaggcaaaaatgctctatatctttgatttaggtaatgtgattgtcgatatcgactttaaccgtgtgctgggagcctggagcgatttaacgcgtattccgctggcaagccttaagaagagttttcatatgggggaggcgtttcatcagcatgagcgtggggaaattagcgacgaagcgttcgcagaggcgctgtgtcatgagatggctctaccgctaagctacgagcagttctctcacggctggcaggcggtgtttgttgcgctgcgcccggaagtgatcgccatcatgcataaactgcgtgagcaggggcatcgcgtggtggtgctttccaataccaaccgcctgcataccaccttctggccggaagaatacccggaaattcgtgatgctgctgaccatatctatctgagccaagatctggggatgcgcaaacctgaagcacgaatttaccagcatgttttgcaggcggaaggttttagtcccagcgatacggtctttttcgacgataacgccgataatatagaaggagccaatcagctgggcattaccagtattctggtgaaagataaaaccaccatcccggactatttcgcgaaggtgttatgctaaaaaccattcaggacaaagccaggcaccgtacccgtccactatgggcctggctaaaactactctggcaacgcattgatgaggacaacatgacaaccctggcaggtaaccttgcctatgtgagcttgctcagtttagtgccgctggttgccgttgtttttgcgcttttcgccgcttttcccatgttttccgacgtcagcattcagttacgtcactttatttttgccaactttctgcctgctactggcgatgttattcagcggtatatcgaacaatttgttgccaattccaacaagatgaccgccgttggggcgtgcgggctgatcgtcaccgcgttattgttgatgtactccatcgatagcgcgttgaataccatctggcgcagtaaacgagcgcgaccaaaaatttacagcttcgccgtgtactggatgattttaacgctggggccgctgctggcaggggccagtctggcgatcagttcctatttgctctccctgcgctgggcgagcgatctcaatactgtcatcgacaacgtgctgcgtatttttccgttgctgttgagctggatctccttctggttgctgtacagcattgttcctgccatccgcgtacctaaccgcgacgcgattgtcggcgcgtttgtcgccgcactcctgttcgaagcaggaaagaaaggtttcgcgctttatatcaccatgttcccgagttatcagctcatttatggtgtgctggcggtgatccccattctctttgtttgggtctactggacatggtgtatcgtcttgcttggcgcggaaattactgtcactctcggggaataccgcaaactaaaacaagcagctgaacaagaagaagacgacgaaccatgattgcattaattcaacgcgtaacccgtgccagcgtcaccgtggagggagaagtgacgggcgaaattggcgcgggacttttggtgttattgggtgtcgaaaaggatgacgacgaacagaaagcaaaccgtctgtgcgagcgtgtgctcggctaccgcatctttagcgatgccgaaggcaagatgaatctcaacgtgcaacaggcgggcggcagtgtgctggtggtttcccagtttaccctcgccgcagataccgaacgggggatgcgcccaagtttctccaaaggtgcaagtccggatcgcgcagaggcgttatatgactatttcgtcgaacgctgccgtcagcaagagatgaacacgcaaacaggacgcttcgctgcggatatgcaggtaagcctggtcaatgatggccccgtgacattctggttgcaggtatgagccagcttccagggttgagtcgggaaacaagagagagtatcgctatgtatcaccttcgggttccacaaacagaagaagaattagagcgttactatcagtttcgctgggaaatgttgcgtaagcccctgcatcaaccaaaaggtagcgaacgcgacgcgtgggatgcgatggcgcatcaccagatggtcgtcgacgagcagggtaatctggtggcggtaggccgactgtatattaatgccgacaatgaagcgtccattcgctttatggccgttcatcccgacgtgcaggacaaagggttaggcacgctgatggcgatgaccctggagagcgtggcgcgtcaggaaggcgttaagcgcgtgacctgtagcgcccgtgaagacgcggtggagtttttcgccaagctggggtttgttaatcagggagaaatcaccacgccaaccaccacgccgattcgccattttttgatgattaagcccgtcgccactctggatgacattctgcatcgcggcgactggtgcgcgcagctgcaacaggcgtggtacgaacatatcccgcttagtgaaaaaatgggcgtgcgcattcagcaatataccgggcaaaaatttatcactaccatgccagaaaccggcaatcagaatccgcaccatacgctgtttgccgggagtttattcagtctggcgacgctcactggttggggacttatctggctgatgctgcgtgaacgccacctcggcggaacgattattcttgcggatgcgcatatccgctacagcaagccgattagcggtaaacctcatgcggtagccgacctcggtgccttaagcggcgatctcgaccgtctggcgcgcggacgaaaagcacgggtgcagatgcaggtcgaaatctttggcgacgagacgccgggtgcagtgtttgaaggcacgtatatcgttctgcccgcgaagccatttggcccgtatgaagagggcgggaacgaagaagagtaactgatggagaggggcggtgctgcctctctcattcaggtcatttatattagtccttggctatttcggttatattaaataagaactctataaatttttattcttcgttggctccatacgtgtcttgctacatcactgttcaggagcatttaaatattatttgtagaactgagtggcaattatcgcagataatgcttaattcatcatcttagttcatgtttgagcgatttttgatagtcaaaaccccctctggtgccatacttttctcataaatatttttaaaatctatagctaacaaatattatgcaaagataatggactagcatcattgtcagtatcattcatttactgctctgtatgttatgaataattatgttgtatgtttgctcttaaaccgtgggaaggaggctataatggttgccaatattaatctcattaaacaagaaagttattctgttgttaatttagaaaaacaactttcccgaactgttaccaacaaaattataacgatgagcaagtaaagaccggttggtggcagtactgaccggtctgtgatgaaagattaatttcaccttaaatcctggtgctgttaggatgctgacgtttttcggctacaccattcagattatgcaaataaatatctctgaatataatatattcatagcacccataattcatcctgggcgataactaaaccatttttgagtaataaatgaaacaactgcaacactcttattatttctggaaaacgcctcgcaaaaacaaaacaacatgcaaaaatccgctttttttaaatgattttccggcgtaattttcgcacatacattaatgagtaatatatgtaaggtattggtaatggcgatgaatacggtttttcttcatttaagtgaagaggcaattaaacggctgaacaagcttcggggctggcgtaaggttagtcgatctgcaattttacgcgaagcggtagagcaatatctggaacgtcagcaattcccggtgcgtaaagcaaagggaggcaggcaaaagggggaggtagttggtgttgatgatcagtgtaaggagcataaggaatgacaaaaatttttcattcttgaatataaaaaacagatgcccttattctggtattaatacaaggctgttttacttgaacttataataactgcaactgttacatcatatctggaaaacgcctcgcaaaaataaaaaatgatgcgtaaatgagctttctttaaagattcggcaagggtacttttctctccatagattcaaaaatgatattggcgagatatttatgaactctctggcaggtatagatatgggcagaattttactcgatttaagcaatgaggtgattaagcaacttgatgatctcgaggtgcagcgtaatcttcctcgtgcggacctattaagggaagcggtagatcaatacctgataaatcaaagccaaacagcaagaaccagtgttcctggcatctggcaagggtgtgaggaagatggtgtcgaatatcagcgtaagctgcgcgaggaatggtaatgggaaaaaatgatgtcaatcagattgctgacaacgtgcgcgttgttcatgccggatgcggcgtgaacgccttatccggcctacaaagtcgtataaattcaatgtattgcagtttattggtaggcctgataagcgcagcgcatcaggcaatcttacgcttgtcatcagtctcatgcccataaccttattgatgtggtggtgggtaaattgaggccaaaccggcactggcggcatagcttgaggtggtaacgcggaatacgagagatggtgtcgtcacaccctatgagctgtaatccgggcgacctgcgccacccggaaaacgtcagagattactctccttcacccggaaacaggaacgggttgatggaactgcgggcatagccttcttgctccattcgtgcgtccagtaccagagaggcgaggtcatctgctacggcttcgatttttggatctttttcctgatagagaattttcaggtaagtgtcgcagtcatcgcagctttcggctttaatcgcggcctgttcgtcatccaggctccagtaatgcagtttgccgctctgctcgcagttgctgcattttacgcgcactacgtgccattcagtttcacacaggttgcagtgcaggtaacgtagcccctgagtggtgccaatttgcaccatgctggacaccggcatagaaccacaaaccgggcaatattgacgttgctcgccgtattcagcgcgggctttgccggggatcagattggccatctgcgcccagtagaggctcagtgcagcccagataaacggcgctttatcgctgctgacggagctgaaatcagaggcaaacagcgcgctggccatatcttccagctcctgagtgcttgccttctccagattctcaatcactgccagcgccgggccgctcatttcaggtttcagctcagcaatcagcgccatcagcagcttttgccagtgcttatcacgcggcagaacgtgaatatccagcgggggcttgccttgtgcgctggcttctttaatgcgcgcagtcagatccatctccagcggatggtcgtacagcaccacttcctgggcgtgggcgataagcgcagcaaagcgcaggtaatcacccagaggattattttctgccagctcgcgcagacgctcggcgcggcggttgtataaattcttgagccgagggaacaataacggcggaatcatatccgccgtacgtttctcgctactacccagctcatcttgcgggattatgcgaatactcattcagctttcttttccgttgtcttgcggacctcacggtaccagcgcgggtgatgtttcttcgcccaggcgctggtaacccatccttccaccatggcggtaatcgtgcctttcacccaaagggcggcgtagatatgcaccatgataaccacaattaacgccactgcggcaaaactatgcagcattaacgcgaatcggatcaccgggatactgaaagcaggcgcaaaataaggacgccagataatcacgccgctcaccagcagcagaaccaggaaaataatcgccgcccagaaaacgcatttctgaccgaagttataacgcccggtgtcacctacttcctcgttgacgacgatcttacgaatattcttcgcccaaaagatatcatcccgattgattaggttgtgatgccagtaacggaaaaacatgatgatgaagctggcaaacataaccacgccgacaaacgggtgcagaattcgcgccagctgcggtgtgcccatgatttgcatcaaccagttgaaggacgggaacaaaaagcccagcccgctcaccgccgccaggatgaagcagaaggcggtgatccagtggttgatacgttccggcgcggtgtagcgcacgatggtgtcacgtcgtttcatttgcgctcctcgtctttctcttcgtgcagattattctcttcctcatccgcacggttcggaccgacacccacgtagtggaagatactggccgcaaaggtagccgcaaagccaacagccgcgagcggtttccagatgcctttccagaatttcacggtttcgctgatttccgggttctccggcaagccatgatacagatttggcttgtcagcatggtgcagcacgtacatgacgtgtgtaccaccgacgcctgccggatcgtacagacccgcattgtcgtaaccgcgggttttcagctcagcaacgcgctcgctcgccagcgttttcatgctctctttcgtaccgaagtgaatcgcgcccgttgggcaggtcttcacgcaggctggttcttgcccaaccaccacgcggtcaacgcacagcgtacatttgtagacgcggttgtcttccgggttgaggcgcggaatgtcgaacggacagcccgcaatgcaataaccgcagccaatgcactgctcggactggaagtcgacgataccgttggcatactgaataattgcaccttccgccgggcacgctttcaggcagcctggatcggaacagtgcatacagccgtctttgcggatcagccattccagtttgtcgttctgctccacttcgctgaagcgcattaccgtccagcttttggcgcttaaatcattggggttgtcgtacaccccaatgttattgccgacggtatcgcgaatgtcgttccactcactacacgccacctgacaggctttacagccgatacaggtggtaacgtcgatgagtttcgccacttcttcctggaagtcccgcgcctgaggcgcgggggtcagaccgttagtcgcggaacgacgaatgatatcttgagattgataagccatatgtcgtctccgttacaccttttccacattcacaaggaaggacttaaactccggcgtctgcgtgttcgcatcaccaacgaatggcgttaaagtattggcaataaagccttttttagctacgccttcatagccccagtgaatcggaataccgatggtatcgatatctttgccgttcgctttcagcgtgcgaatacgtttggtcaccaccgctttggctttgatatagccacggttggaggagactttcacggtatcgccctgggcaatgccaagtttattcgccaggctctccccgatttccacaaactgctctggctgcaaaatcgcgttcaacagcgcgtgtttggtccagtagtggaagtgctcggtcagacgataggtggttccgacatacgggaacttatcggctttacccaatgcttcggcgtcgtctttaaagatacgtgcagccgggttgctgataacgtttggatgcagcgggttagttcccagcggcgtttcaaacggctcgtagtgttccgggaacggaccttccgccatcttatcgagggcaaacagacgccccatgccttcctgctgcatgataaacggcccgacgccgctacccggaggcgctgcgctgtagtccggaatatcccagccggtccacttagtgccgtcccatttcagcaactgacgcttcggatcccacgggttaccctgcggatctgcggaggcgcggttatacagaatgcggcggttaagcggccatgcccatgcccagcccagcgtgttaccgaggccagacggatcggcgttatcacggcgtgccatctggttgccttccggcgtccagctaccggcgaaaatccagcagccacaggaggttgtaccgtcatcgcgcaattgggcgaagctactaagttgttggcctttcttgacgataaccgcaccggttgccggatcggtaatatcggccagcgccttaccgttgctctccatcgccacttcttcactagatggctcatgcggaatggcgtagttccatgtcatgttcagcacctggtccgggttcgcgccaccctgttcggcatacatcttgcgcaagcgcaggaagataccggagaggatctcgccgtcagtcagcgcaatccccggggcgtccgcacctttccagtgccactgtaaccagcgaccactgttaacgatagaaccgttctcttccgcgaagcaggtgcttggcagacggaacacttcggtctggatcttgctgctgtcaacttcgttcagctcaccgtggttctgccagaagttagaggtttcagtgttcagtgggtcgatggtgacgaggaacttcagtttgctcagacaaccgatcactttgtttttgttcgggaaactggcaacagggttaaagccctggcagatatagccattgaccttgccctctttcatcatctcgaagtattgcaggacgtcgtagcctttatcccacttcggcaaccagtcaaagccccagctattttccgccgtcgctttatcaccaaagaaggccttcatcatagagacgaagaatttcgggtagttgccccagtagtttacctggccttccagcagcggttttggcgtgttggcggtaaggtaggtttgcagatcggtctgcttctcgcttggcagcgtcatgtaacctggcaggctctggctcagcagccccaggtccgtcagcccctgaatattggagtgaccgcgcagggcgttaacgccgccgcctgccatccccatattgccgagcagcagctggatcatcgccatcgtacgaatgttttgcgcaccaacggagtgttgcgtccagccgagggcatacaggaagctggcagttttatcgtgagcactggtttctgcgatgtattcgcagactttcaggaacgcgtcttttggcgtaccacagatgttttcaaccacatctggcgtgtagcgggaaacgtgctgtttcagcaagttccacacgcagcgcggatgttgcagcgtggtatcgcgtttggcgaagccgttttcgtccagttcataagtccaggaggatttatcgtacttgcgtttttccgcgtcgtagccggtgaacaggccatcttcaaagccgtaatcctcacgcacgatcaggctggcgttggtataggcttcggtgtattcgcggttgaatttttcattgttcagcaggtacagcaatacgccactcaggaaagcaatgtcagtaccggaacgaataggggcatagtagtcagctaccgccgccgtacgcgtaaagcgaggatcgatcacaatcagcttcgcgccgttgtgaattttggcttccatcgcccagcggaacccgaccgggtgagcttcagcggcgttaccgcccatcaccacgacgaggttggcgttcttgatgtcgacccagtggttggtcatcgcaccgcgaccaaatgttggagcaagacttgctaccgttggtccgtgtcagacacgcgcctggttgtcgaccgcgagcatacccagcgcgcgggagaatttttgcgttaaatagccggtttcgttactgctcgcggaagcacacagcatcccggtggagagccagcggttaacagtcacgccttcggcgttttgcgcaatgtagttagcatcgcggtcttctttcatcagtttggcgatgcgatcaaacgcctcttcccaactgatttgctgccatttatcagaacctggcgcacggtattccggaaacttcagacggctttcggagtggatgaaatccaccaggccagcgcctttcggacaaagtgcaccgcggttgaccgggtgatccggatcgccttcgatatggaagatagatgctttggcgttttttgctccgtcaccgaggctgtacatcaacagcccacagcctacggaacaataggtgcaggtattacgggtttcgcgggtgcgcagcagtttatactgccgggtttccgcgagtgctacgctgggtgcaaaacccagtgccgctgccgtggtgcctgccataccgccagcgcagatcttaaagaactgccttctgctgacctgcatggattgctccttgtttcgacattgtcacgtcccatttacattcgcttgctgcgtgtgcagggagtgggagttatttttctttgcggaaggggccgcaaaggtccagaattggctcaatttccctccatccaggaagggtttgtaacagaataccataatgttggtgtgtgtgttcttatctggttaagagaaagtgaaaaaaacacagcgaaaagaaatcgaaaatgtgacaaatatcacaggtgttcgtcaaattgagttatggcggcgtgatgatttacaacacccacggttagatgaggtcgcggaagaagttcccgttgcgctggtctacaacggcattagccatgtggtgatgatggcgagccccaaagaccttgagtactttgcgctcggttttagcctttccgaggggattatcgaaagtccgcgcgatatcttcggcatggatgtcgttccttcctgtaatggtcttgaagtacaaattgagctttccagccgccgctttatggggttgaaggagcgccgccgggcgctggcgggacgtacgggctgtggcgtatgcggcgtggagcaacttaatgacatcggaaaaccggtgcagccgctaccgttcacccagacgtttgatctcaacaaactggatgatgcattacgtcatctcaacgattttcagccagtggggcaactgactggttgtactcacgccgctgcctggatgttgccatctggcgaactggtcggcgggcatgaagacgtgggtcgccatgtggcgctggacaaactgttaggccgccggagtcaagaaggggaaagctggcagcaaggtgcggtactggtttccagtcgtgccagttatgaaatggtgcaaaagagcgcgatgtgcggcgtagagattttgtttgcggtgtctgccgcgaccacgcttgctgtagaagtggctgagcgctgtaatctgacactggtaggtttttgtaaaccgggtcgggcaacggtttatacccatccgcagcgtttgagcaattaattaaaataagtcctgcgaaatatattaaattgcaggacttattcatttcgtgaattttattattttatttataaacaaaatgcgtgtagtggcgttttcttttttcatttattatgttcactctcttatctatatatttataaggcaattaaatgaaaaggaatttattatcttccgctattatagtcgccatcatgtccctcggtctgacgggttgtgatgataaaaaagccgaaacagaaacgctcccgcctgccaatagtcaacctgccgcaccagctcctgaagcgaaacctactgaagctcccgttgcaaaagcagaagctaaacctgaaacacctgcgcaaccggtggtcgatgaacaagcggttttcgacgaaaaaatggatgtctatatcaagtgctacaacaagttacagatcccggtacagcgcagtctggcgcgttatgctgactggctgaaagattttaaacaggggcctaccggtgaagagcgtactgtttatggcatctacggcattagtgaatccaacctcgctgagtgtgaaaaaggcgtaaaaagtgctgtggcgttaacgcctgcgctgcaaccaattgatggcgtggcggtgagttatatcgatgctgccgtggcgttgggtaataccattaacgaaatggataaatattacacccaggaaaattataaagacgatgcgtttgcgaaagggaaaacgctgcaccagacattcttaaaaaatctggaagcctttgaacctgtagccgaatcttatcatgcggcgattcaggaaattaatgataagcgtcagcttgcggaactgaaaaatattgaagaaagagaagggaaaacattccactactactctctggcagtcatgattagtgcgaaacaaattaataacctgataagccaagataagtttgatgcagaagcggcaatgaagaaagtgtctgaactggaaacgctagtggcgcaggccaaagaagcggataaaggcggcatgaatttcagctttattaatagcgcaggccagtatcaactcgaggctaaaaaatacgttcgccgcatcagagataaagtcccgtactctgactgggataaagagcaacttcaggacgcaaacagtagctggatggtcgaagactctttcccgagagcattacgcgagtacaacgaaatggttgatgactataatagcctgcgttaaacgtttttgatgataaatgcagtgtcggatgcggcgcatccgacacagttcaccccttgtgaagtaactccataaatgcctcatatcctgttaacccggcaataatctccgccggatgctgacacaatatgcttgccagatagctaaatatttttagctcatgacgcgcatcggcggcggcgcaggcgatcaagacatggttaatgacttcgttattcacctcaactggttgggcgagggtaataaaaaatccacgaaaacgtcgctcctgttcgctccagcaatgtgggatggcgaggcgattaacaatcaggttttcaccttcgccttcgcgggcgatgatgcgttgtgcttcatcggcggtaatatggtgttgtgcgactaattgcgcacaaatttgccgggtaatatgttgccagctttcaccgcgtacattgctataatgaaaacttccgggggcagagaaaaaacgctccggctgttggcgaataaatgccgtcgccagaaaatgttttatttgttcgataccggcagccgtaatgatattttttacggtgatgtaattatttaccgcgtcatccagtaaataatggctgttgttaatgatcaataacggctcaatctcttcgcgaatggcaacaagttcgcttaagctacgggcaataattacccgacaatttaaaacatcgcgctcaatggcgagctgattaatagtggcaatcgcgttctggtcgctgagcaaaatgatcggctggcgttcgttttgatgccgctccagcgcacaggcaaaatacaaaccgatcagatcgctgtcgaaaaggggaatatcgagctgttcacgcagtagcgtaataaagtgcagactcatatcaaaggccgcaggccaggcggctttcaggttattcatgctgctctggcggtgctcagcaatccacactggtgcggcaaggcaacgtaataaatgcccggtaatattctcaaccagctgcgcatcaataatattcaaactcgcgatgcccggcaccctttgcagcaacccctgcacattatcggcactaattacctgcgcttgctgatgctgtttctctatcaaacccgtcagggttcttacagcgttatcaccaagaaacagaccgctatgttcaacgatttgttttatctcgtcaccgggatattgcggccactcatcggtcagttgattacgcagggcgtaaatcgccagaatcaggctggagagataatcaccctgcatgagcggccagcggtgttggttgtcgcaggccgtggataaatgctgaaggttgtctcgtgttatgcccgccagcggaattaaaaacggatctttgcgcagcaagttcgccagcaagataacgcgtttctcttctgtctcatcaatgaaatggcccaaaccagggcggctggccaggcaacaagtgcgttcataacgctgttttaaccggggcagacgctctgctacccacgtttctggcaaattaagcgcgctggcgagttgcgcacggggagtgaaagtattcagtaataacagcgccagcagccgatcgtcgttatcgtgcttttgcagcaactgaaaaaagctgcggcgctcgaagatttccagctgatagcccgcactgccactggcgaaaatgcgggctttgccgttaagggtgaagttgagatagtcaatatcacgcaggatggtcctgccactaacgccagtctgttgcgccagctcgccaggcgtgcgcggctgttgctccagcagatcgacaatctttaactggcgttcgtttagcattaatccacctgacggaactggctaaacgcgttgactttctccgcagttaaggtcgtcagaaaaccccgtatcagcgtgagcagagcttcgtaatcggctttactaatcataccgctgttggcgtgcagataacgagttggcagacacagcgcgacaaccggacgcccgccgcccatcacgttgtagcgcccgccatccgtcgcaccggttttcatggtggaaaattgcagcggtaaatcgttatgtgcggcacagctttttaacgctgctaccagtttctggttggggaagtagcgcttgtcaaacagcatcagccccggcccctggcccagtttcagcgggtatttaatgttatcaatgcccggaacatcgcccgctacggcggtatccaacacgatcacgacgtccggtttaatgtgttccgcgctggtttgcgccccgcgtagcccaacttcttcttccacactgccaacgccatacagcgtaatttcgggattattcaccgtctgcaatagttcagccatcattgcgcagccgatgcggttatccaacgccttgccgaccactttatcttcgccccagcaggcaaaattggcttccgggctaataaaattaccaatttccacgccgcgcttttccacctcttcgcgactgttcgcgccaatatcaatgaacacctcatcaaaactcagcggttgttgcttttgcttttccgttaacgcatgaggcgcgacggaaccaatcacaccagggattttcactcccttgtgtgtgcgtatggttacccggtggttgagcatgctctgattccaccagccgccaatggtggtaaaacgcagaaaaccgctctcgtcgatgtgggtgaccataaagccgacttcatccatatgtccgacaacggcaacttttggacctttattccccttacgggcaacaaagctgcccagaccatcgaaggtgatttcattcacgcaaggttccagcgtgtttatcagaatgtcgcgaacttcctgttcatcgccgctgacggcgctggcttcgcacaactgttgcagtaactcaatgttcatggacaagctcctgttgcgcggctttcgctttgcggcgtaaccacaatcctttcaggacgataatgaaactaatgttcagcgcgaggccaatcgccagcaccagataaaagctacccaccgggctcatcaggccgatcagcgggtcaaagatacccaaaccaggtgccagacgtttgattccgaaagcgatcaccagcacgccggtaatgccgcccgccagcgtattggcggtaatcatcggcaacggagctgccagagcgtaaggaatagccggttcggttgcgactgtggcaccgaccacaatggcactactggcagcctctttttcctgtcgggtaaacagtttgggcgcaatgaacgtcgcaagacccgccgcgacgggcggcatcagcgcgacaacgccgacgatggcgtaccagtcataaatgtgtttttccagcagactgaagcagaagaaccaggcggttttattgatggggccgcccatatcgaacgccagcatcgcaccgaccagaaacgctgccgcaaacttcatacttggaggaatggtattcaggaagtggagcagcccgcccatgaggtcggacatcaccggcccgataacgtagtaagtgagcacgccgaaaaccagcagagtaacgaacgggatcagcatactaccgagcagcggttgtaatgctttgccaaggcgcactttgcggaaccagaagacgaaatagccaatcgccagccccagcaccaccgcgccgaggaatcccgcaccgctctgggtgccgagcagcgctttgtcgttcgccagatagcaaaccagaaacgccggagcgaaagccggtttatcggcaatgctgctggcaatataagcgcccatgatggggatcataaaggtgaagccaaggtaaccgatggattcaactacccaggtaaagctcggcgcgcctttgctcatatcggtatacggcaaaccgaactgcaccagcatgttggcaagcgccaccaggataccaccgccgatgacaaacggcagcgccgcagagacgcccgccatcaggtggctcatcacgctaccgctttgcacttcctgtttgccaagcttcacgccgctatctgcggcaaaaagctggctgtttgtcggtaattcgctgaaaatctggtcgatatttttcaacgcctgggagatggcaatctcataaactttcttcccggcaaaccgcgcgcgatcatcaccgctcaggccacgcccggtagcgagaatgacgtaatcggcagcggcaatctcttcgctggataagcggttttcaacgccactggacccttgagtttccacttttatggtatgaccgagagaacgggctttctgttccagggcttccgccaccatgtaggtgtgagcgatcccggcggggcagttggtgatcgcgacaatacgtaaggaactctccatcgccacttccttaactgctgagggtttgatttaacaaggcaagcgcctggtcggtatcgccctgttgcagttgatgaataaattccttgtgaataattttgcgacacagtgtgccgatgattttgacctgatcctcttcgccgctttgcggcacgccgaggcagatccagcaattgacgtcttcgccatcgctggctttccagtcaatagcctgcgctttgcgggcgaataatacgaacggttgtttaacgcaggcgcttttaccgtgcggcacggcgacaccggaaccaaatccagtagagtgcattttttcgcgcagcagcagggtttgcaggaactggtgactgtcggtgataaaaccgttttgtaacgctattgtcgccaactgcttcagaacggaataagcgccattgccctgaatattcaggtcaatacagcttgcagtaagagctgccattaatcggactccataaaatatattttaatcaattgtaatggtggagcgattaagtgatgagaggcgatatgtcggtaaacaatgacaatttgagacagagtgaaaggtcagatttgcggagtaatgcacataatggttatttaaataaaccacatgaatcattaatgggttattcattatttttgtgatttactcacaatgtatcagggaaatataacttaccgggagatgtaatatgtttaatttttcaaatcgaaatttaaaatattgtgccggaggcatctctggcacattgggcaattacggcaggtaaaacacttcttgcagctcgctactcaccgggctgttatccgggttagcgggcataacatcggtcatatatttccaccaacgttggcagacatcagtgctggcaaccgcattccagcgttcttcagattcaatctctaccatggcaaacagcagattacgcgctttgtcgagatagatggcgtagttatgcgcaccgtgagatttcagcactgcttccagttctggccagatgggattatgccgacgctgatactcttcgtgggcgtcggggtttacctgcatgacaaaggctttgcggatcatgtttgctccttacagcgccagcgcactggcgagtggcgtaacgccgaaacgcttgccgagcgctatcaactcttcacggctgatggtctgtttcatgccgcccatgctataaaccttcactaatacttgtgcacttttttctgcggtgtcgattaaaccgaaggtttcatccagcgtcggtccgctgccgaagacgccgtggaagggccacaacaccaggctatgtttttgcatctcttgtgcggtcgcctggccgatttcgtccgtgccgggcaccatccacggcaaaatgccaacgccatccgggaataccaccagacactcggtgctgccttcccccagttggcgagtgaagaccgcggtgtcgttttcaagtacataggtgagggcgatcaggttggtggcgtggcagtgcatgatcacccgatctttgccgttggtggctttaatgcgctcgcagtgggaaaggaagtgagccggaagttcggaagtggggacggcttcgttggttaacccccaaagaatgtggtagcccgcgccgtcgctgtcgacttttacgatgcctaagttagccgcaggatcaagctggacgttacggaagaatttgccgctgccggtgacaataaacggtgtatttgccagtaaaggcatgggctggctgagcgggatatagcgcggttgttggtggaaattgtcgtgatatggtgcgatatcggcgtcatccaggcgtagcgtcaggttgccgccgttgcgctcatcccagcctttcagccaggcgtcggtggtggctttgatcattccctggacaaaccaggactgagtaatgttttgcatgttctgtgttcctgtaaattcggtgttgtcggatgcacgacccgtaggccggataaggcgctcgcgccgcatccggcaatcaatgcctgatgcgacgctgtcgcgtcttatcaggcctacaactattgccgacctgtaggcctgataaggcacttgtgccgcatccggcaatcaatgcctgatgcgacgctgtcgcgtcttatcaggcctacaactgttgccgacctgtaggccggataaggcacttgtgccgcatccggcaatcaatgcctgatgcgacgctgtcgcgtcttatcaggcctacaactattgccgacctgtaggccggataaggcacttgtgccgcatccggcaatcaatgcctgatgcgacgctgtcgcgtcttatcaggcctacaactgttgccgacccgtaggccggataaggcgctcgcgccgcatccggcagtgtttacccgcggcgactcaaaatttctttctcataagcccgcacgctctccagccattcgctacctgctggcgtatcgtgacgttggcaatacatttcccagaccgcctgccacggcaagcttttctgctcttccagcagtgccagacgcgcagtgtaatcgcccgccgcttccagcttgcgcagctcagcggtaggttccagcaacgcacgcagcagggcttttttcatattgcgtgtaccaatgacccacgcggcaatgcggttgatagaggcatcgaagaagtcaaggccgatatgcacccggtcaaacagatcgtgacgcacaatctcactggcaattgcctgggtttcatcatccagcagcactacgtgatcgctgtcccagcgaaccggacggctgacgtgcagcagcaactgcggcacatacagcatggcggcggaaatcttgtcggaaatcacttcagtcgggtggaagtgcccggcgtccaggcacagcgcagtctggcggctggtggcataccccatgtaaaactcattggagccaaccgtgtagctctctgcgccaatgccaaacaatttgctctcaacggcgtcgatatggtgcgcagggtttagcttctcgctgatcacctcatccagtgctgccagcagacgctgacgcggggcgagacggtcaacggtgatatctttcataccatccgggatccagatgttcatcacgcttggtgtgccgagttgctcgccaaaataggcgctaacgcgacggctggctttgcagtgatcaatccagaactggcgaatgctgtcgtcggcatgggaaagcgtaaagccatcggcgcttagcggatggctaaagcaggaggggttaaaatccagaccgagctgattggctttcgcccattcaacccagtttttgaagtgctctggtttgatctggtcgcggctgactggcgtatcactttccagatagatggcatgtaaattaagccgtttcggccccggaatcagccgcatagcctgttccagatcggcacgtagctcactggcattacgcgctttgcccggataattgcctgtggcctgaatccccccggtcaggctaccttccgggttttcaaaaccggaaacatcatcgccctgccagcagtgcatactaacgggtaaacgatcaagttggcgcagcgcctcctcgacatcaatccccaccgccgcgaaacgctgtttcgctagctcccaggcctgttccagttgagtggtcatgcgcaaagctcctttgtctgtcgtgtagagtgaatctgcgccacatagtgggcaatttcactgtcaggattaggggtaaaggtggtcagattcgcggtggtgctgacgacctgacggaaatcatccacattgttgagttcatccagcgtcattaactggatgccgatattgccgagcgtgctggcttcaacaggcccggcgatcacccgaataccgcaggcatcggcgcatagctggttgagcagcgtgttctggcagcctccgccgacaatatgcagttggctgaaatcttcaccgcgcagctgcgccagctcatgcaacacatcggcatacagcagcgccagactgtcgaaaatgcagcgcgccagttcagcatcactttccgggatcggttgcgccgtttcccgacacgcagcctgaatttcgctgcacatcgtctcaggattaataaagcgatcgtcattgggattgataatgaagcggcaagccggaagtgcctgtgtcgcggagataagcgccggaagatcgttgatttgctgctcctgaagcactcgctgaagcagccataagcccataatatttttcagcacccgatagcgaccttccgccccgccttcattggtgatgttggctgccagtgccgtgtcattggtaaatggcgtctggctttcgaagcccatcaaactccaggtgccagaagagagataagcagcacgactgccgtttaacgggctggcgataaccgcgctggcggtatcatggctggcaacggcgaccactggaatctcattaccctgcgggcaaatccagtgacctatgacattacccggatgcgtcgggcgaccaaaccaggctttgttggccccgctccacgccagtaggctctcgtcccagtcgtcgctattgatattgaccagttgcgtggtcgtggcgttggtatattcccagttcatcttgccggtcaggcgataactgaagtaatccggcatcagcagagcgtgagcaatgtgtggaataagttcaggttgttgctccgtcagcgcacgcaactgataaagcgtattgaagggcagaaactggatgccgctacgttgataaatatcgcgtttgccgagttgttgttgtgcctgcgccattaggccattggtgcggctatcgcgataagcaacgggcaggcccacacgctgaccctgttggtcgagcagcacaaagtccacgccccaggtatcaatcccaatgctatcgatacgaatcccttcctcgcacaccttgtttaatccaaggcgaatggcactttcaaggctatccacatcccaggtgacatagccgttctgactatgcagcccattgttaaaacgatggatttcgcgcagcgtcaggctgcggcattcacgctcgtaacgcgccagcatcacgcgcccactggatgcgccgagatcgacggcgacacaattgcgaaaggtcataatgtgatcctgctgaatttcattacgaccagtctaaaaagcgcctgaattcgcgaccttctcgttactgacaggaaaatgggccattggcaaccagggaaagatgaacgtgatgatgttcacaatttgctgaattgtggtgatgtgatgctcaccgcatttcctgaaaattcacgctgtatcttgaaaaatcgacgttttttacgtggttttccgtcgaaaatttaaggtaagaacctgacctcgtgattactatttcgccgtgttgacgacatcaggaggccagtatgaccgtattacatagtgtggatttttttccgtctggtaacgcgtccgtggcgatagaaccccggctcccgcaggcggattttcctgaacatcatcatgattttcatgaaattgtgattgtcgaacatggcacgggtattcatgtgtttaatgggcagccctataccatcaccggtggcacggtctgtttcgtacgcgatcatgatcggcatctgtatgaacataccgataatctgtgtctgaccaatgtgctgtatcgcagcccggatcgatttcagtttctcgccgggctgaatcagttgctgccacaagagctggatgggcagtatccgtctcactggcgcgttaaccacagcgtattgcagcaggtgcgacagctggttgcacagatggaacagcaggaaggggaaaatgatttacccagcaccgccagtcgcgagatcttgtttatgcaattactgctcttgctgcgtaaaagcagtttgcaggagaacctggaaaacagcgcaagtcgtctcaacttgcttctggcctggctggaggaccattttgccgatgaggtgaattgggatgccgtggcggatcaattttctcttagtctgcgtacgctacatcggcagcttaagcagcaaacgggactgacgcctcagcgatacctgaaccgcctgcgactgatgaaagcccgacatctgctacgccacagcgaggccagcgttactgacatcgcctatcgctgtggattcagcgacagtaaccactttagcacgctttttcgccgagagtttaactggagtccgcgtgatattcgccagggacgggatggctttctgcaataacgcgaatcttctcaacgtatttgtacgccatattgcgaataatcaacttcgttctctggccgaggtagccacggtggcgcatcagttaaaacttctcaaagatgatttttttgccagcgaccagcaggcagtcgctgtggctgaccgttatccgcaagatgtctttgctgaacatacacatgatttttgtgagctggtgattgtctggcgcggtaatggcctgcatgtactcaacgatcgcccttatcgcattacccgtggcgatctcttttacattcatgctgacgataaacactcctacgcttccgttaacgatctggttttgcagaatattatttattgcccggagcgtctgaagctgaatcttgactggcagggggcgattccgggatttaacgccagcgcagggcaaccacactggcgcttaggtagcatggggatggcgcaggcgcggcaggttatcggtcagcttgagcatgaaagtagtcagcatgtgccgtttgctaacgaaatggctgagttgctgttcgggcagttggtgatgttgctgaatcgccatcgttacaccagtgatagcttgccgccaacatccagcgaaacgttgctggataagctgattacccggctggcggctagcctgaaaagtccctttgcgctggataaattttgtgatgaggcaagctgcagtgagcgcgttttgcgtcagcaatttcgccagcagactggaatgaccatcaatcaatatctgcgacaggtcagagtgtgtcatgcgcaatatcttctccagcatagccgcctgttaatcagtgatattagcaccgaatgtggctttgaagatagtaactattttagcgtggtgtttacccgggaaaccgggatgacgcccagccagtggcgtcatctcaatagccagaaagattaattcgccatgccgatgccgacgatgttagcggcgacaataatcaccacacaaccgaggctcaacaccgttaccggacggcgtcctgcattgttccactctttcagcaccagcccgacgataccgccgcacaatacatagaaactcatatgcagcatccaactgatgtagtcatactgcgccggaatgcgggcgtggccccaggcatagaaaaagaattgcagataccacatcaacccgcccagtgtgctgagtaacacattgtgaatgatcaggctttttgccaggctgaagtcggcttttaggctcaaatccttcacttttgccagacgaataaaacagaaaccgaggttaatgatcgcgccgccgcccatgatgacaacatagcttggcagagcgacatacagtggatcgacgccaagtgcggcagcggcttcatgcatcggttttgcggcgttcatcgcaaaggacatcccggcagagaaaatgccgcacatcaccgccagcaccagcccttttttcagattgaactcttcggctttaatgcccatcttgcgctctttcaactgcccggcgcgagttacaatccctacgccaatcagcgccaccagaacgccgagcaacgtcatgcgtccgccttcggtgctaatcaacacatcgaaattgccgttgataattggcgtcatcagcgtaccgacaatcaacgtaatgccaatggcgatgccaattcccatgctcatgccgagataacgcatggtcaggccgtagttgatattaccgatcccccacatagcgccgaacagaaaaacaggcagtcgcgtagagagactaaagctgctgtaatacgcccagaaattcggtagtaacagggcgctgatggcccacggcagaataatccagctaacaatcccaccgacactccacatggtttcccaactccatttttttacttttttgaacggagcgtaaaaacaggctgcactggccgcgccgatcaaatgccaaaatatccccatcgtaatcgcgttactcatcttcttatcctcatcatttttcgtcgcgtcacatctccgacgagatgagtgtaaaaatcgtgctgtcgattaacctttcgcctgttgccgccgttgtcgatttactggcaatcacggcattaagtgggtgatttgcttcacatctcgggcattttcctgcaaaaccatacccttacgaaaagtacggcattgataatcattttcaatatcatttaattaactataatgaaccaactgcttacgcggcattaacaatcggccgcccgacaatactggagatgaatatgagctataccctgccatccctgccgtatgcttacgatgccctggaaccgcacttcgataagcagaccatggaaatccaccacaccaaacaccatcagacctacgtaaacaacgccaacgcggcgctggaaagcctgccagaatttgccaacctgccggttgaagagctgatcaccaaactggaccagctgccagcagacaagaaaaccgtactgcgcaacaacgctggcggtcacgctaaccacagcctgttctggaaaggtctgaaaaaaggcaccaccctgcagggtgacctgaaagcggctatcgaacgtgacttcggctccgttgataacttcaaagcagaatttgaaaaagcggcagcttcccgctttggttccggctgggcatggctggtgctgaaaggcgataaactggcggtggtttctactgctaaccaggattctccgctgatgggtgaagctatttctggcgcttccggcttcccgattatgggcctggatgtgtgggaacatgcttactacctgaaattccagaaccgccgtccggactacattaaagagttctggaacgtggtgaactgggacgaagcagcggcacgttttgcggcgaaaaaataatcatttgccgcctgctgcaatgaggcgtataggccgcatatcagcttaaaaaatgaaccatcgccaacggcggtggtttttttgtgatcaatttcaaaataaaaacaatgatccgataaaaataaaacagcgtttcaattgatgtggttttgatcacttttattgattaaatgaatgtctatcttcgtttccatcaacactgatgctccattgaggaattacgcatcagcccttaaaaatatgccgacaggtgatggaaatgcagataaagcgcagcattgagaaaatcccggggggggatgatgctcgtcccgctattccttggcgcactgtgccacaccttcagcccgggggcggggaaatattttggaagtttcaccaacgggatgattaccggtacggtgcccattctggcggtgtggtttttttgcatgggggcgagtataaaattaagcgcgacgggaacggtactgcgtaaatccggtacgctggtggtaactaaaattgccgtcgcgtgggtggttgcggcaattgccagccgtattattccggaacatggtgttgaagttggattctttgccggacttagtacgctggcgctggtggcggcgatggatatgaccaatggcggactttacgcttccatcatgcagcagtacggcacaaaagaagaagctggggcatttgtgttgatgagcttggagtccgggccgctcatgacgatgattattctgggcactgccgggattgccagctttgaaccgcatgttttcgtcggcgcagtattaccgttcctggtgggctttgccctggggaaccttgaccctgaattgcgagaatttttcagcaaagcggtgcaaacgctgattccattctttgccttcgcgctgggcaataccattgatttgactgtgattgcccagactggtttgctggggatcctgttgggtgtggcagtaattatcgtgaccggtattccgttgattatcgccgataaattgattggcggtggcgatggcactgccggaattgccgcttccagttccgcaggggccgcggtagcgacacctgtgctgattgcagaaatggtgcctgcgtttaaaccgatggctccggcagcaactagcctggtagcgacggcggtcattgtgactagcattctggtgccaattcttacctctatctggagtcgtaaagtcaaagccagagcagcgaaaatcgaaattttaggtacggtgaaataaacctgcttccttaatccccacagccggatgaactaacgttcgtccggtttgctattgagttcctgcctggatacttaccgcgaaaacagcacgcctgacataaaataaatatggtctaatggggaaatttctcgtggagagggaacagatgcgatatccggttgatgtatacacaggcaagattcaggcttatcccgaaggcaaacccagcgcaattgctaaaatccaggttgatggtgagttgatgctgacggagctggggctggaaggtgacgagcaggcggagaaaaaggttcacggcgggccagacagagcgctgtgtcattatcctcgtgagcattatctctactgggcgcgggaatttccggaacaggcggagttgtttgttgcgcctgcgtttggtgaaaacctcagtaccgacggcctgacggaaagtaatgtttatatgggcgatattttccgctggggagaggcattaattcaggtcagccagccgcgcagcccttgctataaactcaattaccattttgatatcagcgatatagcgcagttgatgcaaaacacaggtaaggtggggtggttgtatagcgtgatagcgccagggaaagtgtctgcggacgcgccgctggagttggtttcccgtgtcagcgatgtgaccgtgcaggaggctgccgccatcgcatggcatatgccgtttgatgacgatcaatatcaccgtttactctccgctgccgggttaagcaaaagctggacgcggacgatgcaaaagcgccgactgagcggcaagatcgaagatttttcccgccggttgtggggaaaataacccccggagtgtaggcctgataagacgctatcagcgtcgcatcaggcatcctgctcaaatgccggatgcggcgtaaacgccttatcctgcctgcaaatgcgaagtttaactccgcttatacagcggcaaccaaatcaccagccgtaaaccgcccagcgggctgtcttctgccttcacccagccacgatgctgctgaatggcggtttcaacaatcgccagccccaaacctgtaccgccagattcacgatcgcgtgcttcatcggtacgatagaacggacggaaaatctgttcgcgatcttccgggctaacgccaggaccatcgtcgtccaccgtaatggtgataccgtctttatctaccgcaaagcccacttcaatcttcgtatgggaataacgcagagcattacgaacaatgttttccagcgcactttccagggcgttcggattgccgtacagcggccacggcccaggcgggaagttaactgtcaagctcttgcccatttgctcggcttcgaacgccgcgttatccagcacttcactccacaactggttggctttgatggtttcgctaaccagcgcgtttttttgctgattacgactcatcaccaacagatcgttgatcatgctgtccagacgttgcgcttcggtttcaatacgctccagttccttgctttcaccgctacgacggcgcagtaacgccgtacccagttgcagacgcgtcagcggggtgcgcagctcgtgagagatatcagaaagcagacgctgctgagaggtcatcatgcgctccagcgcggtgaccatctggttaaaactggcacctgcggcaaggaattcctgtggccccgcttccagttccgggtgctggcgtaagtttccctgggcaacttcatcggcagcgtttttcagcttacgcgccggttttgccagactccaggccaaccacaacagcagcggcgtactgaccaacatggtgacaatcagcagtaatagcgggcggtcaaacagtaagttaatgaaatcggattgagaactgctggccggacgaatcagataaagttggtaattatcttcgccatcacgcacggagaacggaccgaccagttccacgcggccatactttttcttctgcggatgatcggcgttatcggcctgaccaataaagttacgaatgatctgcatttcgctgcgttcagcgccgatcacgcggccttcggtggtcaccaataacaaacgctgtcctggcggtgcccacttatcaatcgcccggaacagacgccgccaccacattaaatcgttgggcggatcgttcgccagctccgcttcgacatgctgctcaatcatcagcccctgacgctgttcgctatccagaagctcggtcatctggcgactatcgagcttgggtaacatcaaaaccaacatcaacaccagcgccagcgtcagccagaagatggcgaagatgcgcgcggttaagctgcctatcatgaagcagaaaccatcagatattagctcaactagcagaaaccatcagatagccgcgaccacgcaaggttttaaaccacgggtgaccatctttacgatccggcagtttacgacgcaggttggaaatgtgcatatcaatagcgcggtcgaaaggcgtcaggcgtttgcccaacacttcctggcttaaatgttcacgggaaaccacctgacccagatgctgtgccagcaaatagagcagggtaaactcagtaccggttaactccagcgtttgcccgtcgaagctggcttcctgacggcctggattcagcactaaggcatcaacttccagtgtcggactaccgttgtcgttgttttgctgttgctcgctccagtggctacggcgcaggatcgcgcgaatacgtgccaccagctcacgatcattaaacggtttcgggagatagtcatctgcgcccagctcaaggccgagaacgcgatcaagttcactgccgcgcgccgtcaacataatgacaggcgtctggtgtgtctggcgaagtgcttttaatgtgtcgataccatttttcttcggcatcattacgtcaagcaaaagtaaatcaatgctgtcgtccagaagatcaagcgcctgttccccatcgtgggcaacaatcacgttgaagccttccatctcgagcagctcctttaatagggaagtcagctctcggtcatcatcaactaacaggattttattcattgtttaaatacctccgaggcagaaattacgtcatcagacgtcgctaatccatgactttacgttgttttacaccccctgacgcatgtttgcagcctgaatcgtaaactctctatcgttgaatcgcgacagaaagattttgggagcaaatgatgcgcatagttaccgctgccgtcatggccagtacgctggcagtcagtagtttaagccacgctgctgaagtcggtagtggcgataactggcatccgggtgaagaacttacgcagcgcagtacgcagagccatatgttcgacggcataagtttaaccgaacatcagcgtcagcagatgcgagatcttatgcaacaggcccggcacgaacagcctcctgttaatgttagcgaactggagacaatgcatcgccttgtcaccgcagaaaattttgatgaaaacgctgtgcgcgcacaggcagaaaaaatggcgaatgagcaaattgctcgtcaggttgagatggcaaaagtccgcaaccaaatgtatcgcctgttaacgccggagcagcaagcggttttaaacgagaaacatcaacaacgaatggagcagttgcgtgacgtgacgcaatggcaaaaaagtagtagcttgaagctattgagtagtagcaacagtcgttcccagtaataaaccctgttttccttgccatagacaccatccctgtcttcccccacatgctgtgggggtttttttatcctcaatttgcctgctgcttaatgcattgcagatgatttgcttccgttatactagcgtcagttgatagcgggagtatttatgaatcaatcttatggacggctggtcagtcgggcggcgattgctgcgacggcgatggctagcctgctattgctgattaaaatttttgcatggtggtataccgggagcgtgagtattctcgccgcgctggtggatagcctggtggatatcggcgcgagcttgacgaatttattggtggtgcgatattccctgcaacctgccgacgataatcacagctttggtcacggtaaagctgagtccctcgcggcgctggcgcaaagtatgtttatctccggtagcgcactattcctgtttttgacgggtattcaacatctgatatctccaacaccgatgacagatccaggcgtcggggttatcgtgacaattgtggcgctaatttgtacgattatccttgtcagctttcagcgttgggtggtgcggcggacgcaaagccaggcggtgcgggctgatatgctacattaccagtctgatgttatgatgaacggcgcaattctgctggcgctggggttgtcctggtacggctggcatcgcgccgatgctctgtttgcattgggaatcggcatctatattttatatagcgcgttacgcatgggatatgaggcggtacagagtttactggatcgcgcattgcctgatgaggaacggcaagaaattattgatatcgtgacttcctggccgggtgttagcggcgctcacgatcttcgcacgcggcagagtgggccgacccgctttattcagattcatttggaaatggaagactctctgcctttggttcaggcacatatggtggcggatcaggtagagcaggctattttacggcgttttccgggaagcgatgtaattatccatcaggacccctgttccgtcgtacccagggagggtaaacggtctatgcttagttaatcagtataaaagagagccagacccgcattttgtgtataaaataccgccatttggcctgacctgaatcaattcagcaggaagtgattgttatactatttgcacattcgttggatcacttcgatgtgcaagaagacttccggcaacagatttcattttgcattccaaagttcagaggtagtcatgattaagaaaatcggtgtgttgacaagcggcggtgatgcgccaggcatgaacgccgcaattcgcggggttgttcgttctgcgctgacagaaggtctggaagtaatgggtatttatgacggctatctgggtctgtatgaagaccgtatggtacagctagaccgttacagcgtgtctgacatgatcaaccgtggcggtacgttcctcggttctgcgcgtttcccggaattccgcgacgagaacatccgcgccgtggctatcgaaaacctgaaaaaacgtggtatcgacgcgctggtggttatcggcggtgacggttcctacatgggtgcaatgcgtctgaccgaaatgggcttcccgtgcatcggtctgccgggcactatcgacaacgacatcaaaggcactgactacactatcggtttcttcactgcgctgagcaccgttgtagaagcgatcgaccgtctgcgtgacacctcttcttctcaccagcgtatttccgtggtggaagtgatgggccgttattgtggagatctgacgttggctgcggccattgccggtggctgtgaattcgttgtggttccggaagttgaattcagccgtgaagacctggtaaacgaaatcaaagcgggtatcgcgaaaggtaaaaaacacgcgatcgtggcgattaccgaacatatgtgtgatgttgacgaactggcgcatttcatcgagaaagaaaccggtcgtgaaacccgcgcaactgtgctgggccacatccagcgcggtggttctccggtgccttacgaccgtattctggcttcccgtatgggcgcttacgctatcgatctgctgctggcaggttacggcggtcgttgtgtaggtatccagaacgaacagctggttcaccacgacatcatcgacgctatcgaaaacatgaagcgtccgttcaaaggtgactggctggactgcgcgaaaaaactgtattaatgatttcggaaaaaggcagattcctttaccctgaaaccgatgacagaagcaaaaatgcctgatgcgcttcgcttatcaggcctacatgaattctgcaatttattgaatttgcaaacttttgtaggccggataaggcgttcgcgccgcatccggcatggacaaagcgcactttgtcagcaatatgaggcggatttcttccgcctttttaatccctcaacatatacccgcaagttatagccaatctttttttattctttaatgtttggttaaccttctggcacgctttgctcatcacaacacaacataagagagtcgggcgatgaacaagtggggcgtagggttaacatttttgctggcggcaaccagcgttatggcaaaggatattcagcttcttaacgttagttatgatccaacgcgcgaattgtacgaacagtacaacaaggcattcagcgcccactggaaacagcaaactggtgataacgtggtgattcgtcagagtcacggtggcagtggtaaacaagcgacgagcgtaatcaacggtattgaagctgatgttgtcacgctggctctggcctatgacgtggacgcaattgcggaacgcgggcggattgataaagagtggatcaaacgtctgccggataactccgcaccgtacacttccaccattgttttcctggtacgtaagggaaatccgaagcagatccatgactggaacgatctgattaaaccgggtgttagcgtgatcacgcctaatccgaaaagctctggtggcgcgcgctggaactacctggcagcctggggctacgcgctgcatcacaacaacaacgatcaggcaaaagcacaggattttgttcgggcactgtataaaaacgtcgaagttctggattctggcgcgcgtggctccactaacacttttgtcgagcgcggaattggcgatgtactgattgcctgggaaaacgaagctctgctggcagcgaatgaactggggaaagataaattcgaaatcgtcacgccgagtgagtctatcctcgcagagccaaccgtgagcgtggtcgataaagtggtcgagaaaaaaggtactaaagaggtggcggaagcctacctgaaatatctctacagcccagaaggtcaggaaattgccgcgaaaaactactaccgtccgcgcgacgctgaggtggcgaaaaagtacgaaaatgcgtttccaaagctgaagttattcaccattgatgaagagttcggcggctggacgaaagcgcaaaaagagcattttgctaacggcggtacgttcgatcagatcagcaaacgctgatttccccaggataattatcaaacccggtggtttctcgcgaccgggttttttatttgtcacgattttgcgttacccttgcatctctttgaggtacagggaaaaaaagatgaaaaaagcgggtcttctttttttggtgatgatagttatcgccgttgtggctgccggtattggttactggaaattaaccggtgaagagagcgatacattacgtaagattgtccttgaggaatgtttgcccaatcagcagcaaaatcaaaatcctagcccatgtgcggaagtcaaacccaatgccggatacgtggttttaaaagatcttaatggcccactgcaatatctgttgatgccaacgtatcgtattaacggtactgaaagtcctttgttgaccgatcctagtacgccgaacttcttttggttggcttggcaggcgcgtgattttatgagcaaaaaatacggccagccggttcccgatcgcgcggtttctttggcgatcaactcccgcaccgggcgtacgcaaaaccattttcatattcatatctcttgtattcgtcctgatgtgcgcaaacagctggataacaatctggcgaacatcagcagccgctggttgccactgccaggtggtttgcgcgggcatgaatacctggcgcgtcgggtaacggaaagcgaactggtacaacgcagcccatttatgatgctggcagaagaagtacctgaggcgcgggaacatatgggacgctacgggctggcgatggtacggcagagtgataacagttttgtattgctggcgacacaacgaaatctactgacgcttaaccgtgctagtgccgaggaaattcaggatcatcagtgtgagattttgcgttaaggcgaagagttaaggaaagtaagtgccggatatgaaatccggcacctgtcagacttaagcctgtttagccgcttctgcagctttaacgattactgcgaaggcgtcagctttcagagaagcaccaccaaccagcgcgccgtcgatatccggctgagcaaacagttctgcagcgttagacgcgtttacagagccgccgtactgaatgatcacttgttcagcgatgttagcgtcaactttagcgatgtggtcacggatgaatttgtgaacagcctgtgcctgagccggagttgcagatttgccagtaccgattgcccatacaggttcgtaagcgataaccgcaccttcgaatgccgcagcaccctgagttttcagtaccgcgtcgatctgacgtgcgcaaacttcttcagttttgcccgcttcattttcagcttcggtttcaccgatgcacagaaccggagtcaggccctgctctttcagcaccgcgaattttttcgcgatcagttcgtcagattctttgtggtaagtacgacgttcagagtgaccgatgatgatgtactgtgcgccgatgtctttcagcatagcagcagaggtttcaccggtgaatgcgccggacaggttcaggtccacgttttgcgcacccagcatgatgtggctgccttcagcttcgcgcttcgccatatcgatatacatttccggtggtgcgattgcaaccgcacagccagcaacacctgccagctctttacgcaggttagaaaccagctcgtgaaccatgtggcggctgccgttcagtttccagttacccatcactaaaggatgtcgcattttaattctccacgcttataagcgaataaaggaagatggccgccccgcagggcagcaggtctgtgaaacagtatagagattcatcggcacaaaggctttgctttttgtcatttattcaaaccttcaaggctttcagatagcgccagcttaatcggttcaacagcgaaggtcagccccttttcgccgttgtccgcgacaacataacgcagtgcaccttctgtctcggtgtaataacgtttgtttttccccgccgttagtaggctctgcagttttttctggctttgtgttttggtcattaatggggtgagtgtgcggatcaccgctgccatgtattcctgagctttcgctttcgcggctttttgctctggcccctggatgggtagccaggtcatttgaatgcttttgatttttaaggtaccgcgctccagcgctgtagaagcatacaagttctcattaattttacttgcagcacgagtgagattggctttgtcgggactgctgtcgatggcacgaaattcgttcagtggcaggctgggattctggctgttaaagtcttctcgaaactggctgatggagagatcgaaagtaggggctccagccagcagataaggcgcggtcgttgccgtatctggtgtttgtgcatgcgcctctgttgtaacggttaatgcagaacataagagaaaaaacagcgtacaccctggcttcattgacagtaccttttgttatgactggctccgattaaaacgatatctgtcgcccttgtcaaaagggtagaatcctggaaaagacaaccatcaaggaacttacatgaccatacagcaatggttattcagttttaaagggcgtattggacgccgtgatttctggatttggataggcctgtggttcgcaggcatgctggtgcttttcagtctggcgggtaagaatctactcgatattcagaccgcggcgttttgccttgtgtgcttgctctggccaacagcggcagtaactgttaagcgcttgcatgatcgcgggcgttccggcgcatgggcatttctgatgattgtggcgtggatgctgctggcgggtaactgggcgattttaccgggtgtctggcaatgggcggtggggcgttttgtcccgacgttgattctggtgatgatgcttatcgatcttggtgcgtttgttggcacacaaggcgaaaataaatatggtaaagatactcaggatgtgaagtataaagccgacaataaaagtagtaattaacctttaatatatctcttactgctatttttttccgggattgttatttccacgatgcaaatgacaatacccggaaaatccttctgaactcttcaccttaagcaatatcaaaaaaaatggtaatccataagatcattacttgtttgttcttcccttaacggcgcattattcttaagtcgtaatcgacagagaggcgaatatacagaggtgccctatgaaagatgtcgtagataaatgcagtactaaaggatgtgcgattgatatcggtacggtgattgataacgacaactgtaccagtaagtttagccgcttttttgccacccgcgaagaagcagagtcttttatgaccaaactgaaagagcttgccgccgctacatcctctgcagatgaaggggccagcgtggcctataagattaaggatctggaggggcaagttgagcttgatgcggccttcactttcagttgccaggccgagatgattatttttgagttaagtctgcgtagcttagcttgatggagttgctttagaaggagttaaacatggcttataaacacattggcgtggcaatttccgggaatgaagaagatgccttactggtgaataaagccctggagctcgccagacataatgacgctcacctgacgttaattcatattgatgatggcttaagcgagttgtatccgggtatctacttccctgcaacagaagatattcttcaattgttgaagaataagagcgataacaagctgtataaactgacgaaaaatattcaatggccgaagacaaaactgcgtattgaacgcggagaaatgccggaaacactgctggaaattatgcaaaaagagcagtgcgacctccttgtctgtggtcatcatcacagttttatcaaccgtttgatgccggcatatcgcgggatgatcaataagatgagtgcggatttgctcatcgtgccgtttatcgataagtaaccgcttaccagtaatgctccgctgtcatatggcccggtcggcgacgtaaatgtttcgtcatctgccgggtctctttcagcaactgttgtgtatcgcgcaccatctgtggattgccgcacagcatcacatggctggtttctttattcatcggcaggccaatcgtgctttccagttccccactttcaattaatgccggtatccgtccggtgaggctccccgctgccgtttcccgactgaccaccgtctgaatgcgcagttttccttcgtagcgtttttccagttcctgcatcagtggcaaatagcttaagtcggcggcataacgtgcggcgtgcaccaggaccagatttttgaagcgatctaaatctttacctagttgcagaatgcttaaataagggccaatcgctgtaccggttgccagcatccatagcgtttcgcagtgcggcacttcatcgagcacaaagaatcctgccgcttcgctaaccacctgcacttcatcgcctggtttcagtgccgccagtcgtgggcttaatttgccatcggggacggtgaccaggtaaaactccagatcgggattatcggggctgtttacataggagtaggcgcgctggacgcgttcgccgtcgatttcaaggccaagcttggtaaattgcccggcggtaaacggaagcacgggggcgtgaacggtgagactaaacagggcgtcggtccagttctgcactttagtgactttgcctgttacccaatcagccatgtttttctcctgttttgattgacttgccttatcttcgttctccgaacaaaaaaattccagtcccgaaggactggaaggctcaatcgatcaaatcaatcagaggatgtgcacctgcatttccgggtctttgcgatccagatagtggatggactgaatgcggcgaatggtgcgactcttgccgcggatcagcagcgtttcggtagtcgcgatattgcctttgcggctaatgccttccagcagatcgcctttggtaataccggtggcagagaagatgacgttatcgctgcgcgccatatcgcccaggcgcaatactttaccggcttcgatgcccatcgctttgcagcgtgccagctcctgctcgccaatgcgacgattctcttcgttgtcgcctttgacgtcatgacgcgccagcagacgaccgttcatgtcgccatctaatgcgcggatcaccgccgcagaaactacgccttccggcgcgccaccaataccgtacagcacgtcaacttcgctgtctggcatacaggtgagaatactggccgcaacgtcgccgtccggaatagcaaatacgcgtacgccgagttgctgcatttcagcgataacggcatcgtggcgtggtttagccagaatcgttaccgtcagttcgctcaacggtttgccgagcgccgccgctacattgcgcaggttatccgccagcggcaggttcagatcaatggtgcctttggctcccggcccgacaatcagcttctccatatacatatccggcgcattgaggaagcagcctttatcgcctactgccagcaccgccagcgcgttagcctggcccatcgccgtcatgcgcgtgccttcaatcggatcaacagcaatatctaccgcgtcgccgcgaccagtaccgactttttcaccaatgtagagcatcggtgcttcgtcgatttcaccttcaccaatgacgatggtgccgtcaatgttgacctggttgagcataatacgcatggcgtttaccgccgcgccgtccgcggtgtttttatcgccgcgtcctaaccatttgtagccagccagcgccgcactttcggtgacgcgggaaaattcgatggcaagttctcgtctcatagcaaactctaagcagtaaggaatggcgcgaagtgtagcacaggggaagggagggattattgatgtgtgcggggttgcccccgcacgtttcgggactaccggatgcggcataaacgcttcattcggcatttacattattcgtcgtgttcttcccacgccatcgcgcgtttaaccgcttttttccagcctgcgtaacggtaattacgctcagtggtttcgatgcctggacggaactcgcgctcaatcaccgctttctcttgcagctcgtcgaggttctgccagaagccaaccgccaggcctgcgagataggccgcacccaatgcggtgacttcgcgcacttccgggcgctcaacgcgggtgccgagaatatcggactggaactgcatcaggaaattgtttgctactgcgccaccatccacgcgcagggcgtgcagacggataccagagtcggcctgcatcgcttccagcacgtcacgcgtctgataagcaatagactccagcgtcgcgcgtataatgtggttagcgttcaccccacgagtcagaccgaaaatcgccccgcgcgcatacgggtcccagtacggcgcacccagcccggtaaatgccggaaccacatacacaccattggtgttttgcactttggtggcgaaatattcggaatcgtaggcgtcgttaatcaacttcatttcatcgcgcagccactgaatggatgcgcctgccataaacaccgcaccttccaacgcatagttcacttcgccagtcgggccgcaggcgatggtggtcagcaggccgttttcacttttcaccgctttctcgccagtgttcatcagcataaagcagccagtgccataggtgttcttcgccatcccttctttcacgcacaactgaccaaacagcgcggcctgctggtcaccggcgatcccggagattggaatacgcgtgccgcctttgccgccaatgttagtctgaccgtatacttcggaagaacgacgcacttctggcagcatctcgcgcggaatatccagcacttccagcattttgtcgtcccagtccagggtatggatgttgaacaacatggtacgagaggcgttggtgtaatcggtcacatggacacggccctgagtcattttccagataagccacgtatcaaccgtaccaaacagcaattcaccacgacgtgcacgctcgcgagagccttccacatggtcgaggatccacttcactttggtgccagaaaagtacgggtcaatcaccagaccggtattgctgcggatataatcttctaaaccgtcacgttttaaatgctcgcagatttctgcggtacgacggcactgccagacaatggcgttatagataggcttgccggtttctttttcccagacaatagtggtttcacgctggttcgtaataccgatagctgcaatttgatcggaactgatatcggctttcgccagcacttctaccagcgtggagctttgggtggcccagatttccattgggtcgtgttctacccaacctggttttgggtagatttgctcaaattcgcgctggctcacgctaatgatattggcatcgtgatccattacgaccgcgcgggagctggtggtgccctggtcgagcgcaacgatatattttttttcagtcatgtttaattgtcccgtagtcatattacaggctagctttttgttcactaggagttgtggtttccttttcttccacaacacagatatcgcaaggcaaatggcgaccaatcagtttgcggtaggcaaatgcacctacaatcgcgccaacgatagggccgaaaagcggcaccaggaagtaaggaatgtctctgccgccggtaaaggcgacattgccccagcccgccagccaggcaaagactttcggaccgaagtcacgcgctgggttcatggcaaaacctgtcaatgggcccatagatgcgccaatgaccgcaatcagtagaccaatcagcaagggagccaaagggccgcgtggtacaccgttgccatcgtccgttaacgccaggatcagccccatcagaatagcggtaatcaccatctcaactgcgaaagcctgcacaaaattgatatgaggattagggtaagtagagaaagtgccagccagatcaacactttcaacgctgccgcgaacaatgtgatgagtctgctcgaagtcgaaaaataaattgtagtaaagcccgtaaactaaagccgcagcacagaaagcgccggcaacttgactaacgataaaaggaataactttgcgcttgtcgaaacaggcaaacagccacaatgcaatggtaacagcgggattaagatgcgcgccggaaacccctgcggtcaggtagatggccattgccacccccagtccccaaatgacactgatttcccactgaccaaaagacgcaccagcgacttttagtgctgcaacgcaacccacaccgaagaaaatcaacaacccggtaccgaggaattcagcaatgcactggcctttcaaggtacttgtttgactcataatcggatcctgaagagttaatgtttgttgtatgcgtgaaagtcacggacctccacgatgcttgtaggcatgctgtaaacttatcgttaacgagcaaaaacgagaaatatcgaacttaaaatgtgtgtgcctcgtcataaaatgagcgttatcgcgccatttattccatctgattgtacatgatgcatgtttgttagatcattcgcgcaacaaatttattaacattttcgattgatgtggattatgtcaccaggagaaggatgaaaagtgtggcaaaccgtaatctgcaaggcgtgccgctggacagcgatggcgcggcttcatacaatcggagctaactaaagtgcgctcgtatttattaaggcgtcaccggtaatcgggacgaggatttttatccatcaacgccttgcaattcaggagaggtatgacaatgagtttagaagtgtttgagaaactggaagcaaaagtacagcaggcgattgataccatcactctgttgcagatggaaatcgaagagctgaaagaaaaaaacaacagtctgagccaggaagttcaaaatgcccagcatcagcgcgaagagctggagcgtgagaacaaccatctgaaagaacagcagaacggctggcaggaacgtctgcaggccctgctgggtcgcatggaagaggtctgattacgcttcatcttccgcgtaatttctttactgtgtaggccaacaggtaacgcagaaaaaaggcaccttgcggtgcctttcttatcattcaatatccagcggatcttcactaagaataatcccggtattgtcggcataaagatggtcgccggagaagaaggtgacaccgccaaaattgacgcggacatcgctttcgccaatgccttcgccagcggcaccaaccggaattgccgccatcgcctggatgccgatatccaactcttccaggtcatctacctgacgcaccgcgccgtaaatgaccagaccttcccattcattttgtactgccagacgcgccagttcagcatcgaccagtgcgcgacgaacagaaccaccgccatcgacgacaagaacacgaccacggccattctgttcgagcagatcgtacagcaacccgttgtcctcgaaacattttaccgtgattatttgtccgccaaagctcgcccgtccgccaaagttggagaacagcggttccacgacgttaacatcttcttgatagatgtcacaaagctcggaagtatcgtatttcataggcttaacattcagttgctgcgagaattttcagtatatcgcgctatgtgggctgttggcaaaatcatcaattgttaattgatatttgtcagttatgctgcccactggcttaggaatatccctaaaacaaacagcaggttagtcagtaacgctcccttgacagtacgttccagcattggtcgcatcgccaccgggtccatttcccgcatcacataacgggcttgcttcaccagtaatggtgccgccagcaggaacagccagccccacaggctatgcaggctaaagagattaaacagcgccagacacaccaggctgcccatcagcaggcaggcatgataacgacgcgcgttcacttcacctaagcgcaccaccagcgtgtttttgccattttcgcggtcgctattgatatcacgcaggttattaatattcagtactgccgttgccagcaggccgcatgcggtcgccggaaggatcagtgccggaatcaatgtatgagcctgtaaataccagctccccatgacactcaaccagccaaagaaaaccagtacggaaatatcacccagaccgatataaccataaggacgattgcccacggtgtaggtgatagcggcaatgatgctcaacccgccaagaatcaggaaaccgacaaaatcggccagcgtatggcatgccactgcaaccagtgccagcccggagagacagatgagcacgacggtaataatgagcgcccgtttcatctcttgctgggtaatgacccctttttgcatgccgcgtagcggcccaatgcggtcaggtttatcgctgccttttaccgcatcgccgtaatcattggcgaggttagaaaggatctgtaatagcccggcggtaattagtgccagcagggcgaccagcggatcgaagtgaccttgccaccatgccagcgctgtcccgacgataattgcagcaaaggcgagggggagggttttaggtcgtaaactttccagccacgcctgagttcggctaatttgttgttcagtcataatacgcgccaataaaaatggggcctttcagccccatcaaacaatgatgaaaatgattgaacgcgattataggataaaacggctcagatcttcatctgccaccaacgcatccagatgtttgctcacataatctgcgtcaatagtgatattttgaccgcttaaatcgctggcgtcgtaggaaatctcttccattaaacgctccagaacagtgtgtaaacgacgagcaccgatgttttcggtagattcgttcacctgccatgccgcttccgcgatgcgtttaataccggagtcggtaaactcgatatttacgccttcagtcgccatcagtgctttgtactgcacggtgatagaggcattcggctcggtcagaatacgctcgaagtcgctggtggtcagcgcctgcagttcaacgcggattggcagacgaccttgcagttccgggatcaggtcagacggtttcgcaatctggaacgcgccagaagcgataaacagaatgtggtcagttttgaccatcccgtgtttggtggaaacggtgcaaccttctaccagcggcagcaggtcacgctgaacgccttcacgagaaacatccggaccggaagactcgccgcgcttacagattttgtcgatttcgtcgataaacacgatcccgtgctgctcaacagcgtcgatagcgtcttgcttcagctcttccgggttcaccagtttcgccgcttcttcttcaatcagcagcttcatggcgtctttgattttcagcttacgcgctttttgcttctggccgcccaggttctggaacatggactgcagctggctggtcatctcttccatgcccggaggagccataatttcaacgcccatcggtgctgcggcaagatcgatctcgatttctttgtcatcaagctggccttcacgcagttttttgcggaatgcctgacgagcagcggacggttcctgctgctgttcggtctgtccccagttgtttttagcaggtgggatcagcacgtcgagaatacgttcttctgccagttcttcagcgcgataacggtttttctcgatagcctggacgcgtaccattttcacggcggcatcggtcagatcgcgaataatagaatccacttccttaccgacgtagcccacttcggtgaatttggtcgcttcaactttgatgaacggcgcattcgccagcttagccagacgacgggcgatttcagttttaccgacaccggtcgggccgatcatcaggatatttttcggggtcacttcatggcgcagctcttcgttgagctgcatgcgacgccagcggttacgcagagcaatcgccacagaacgcttggcgttgtcctggccgatgatgtgcttatccagttcgctgacgatttcgcgtggggtcatttcagacatgggagatccttacgctttgtagcttaattcttcgatggtgtggaaatggttggtatagatgcaaatgtcgcctgcaatatccaacgccttttcagcaatttcacgggcgctaagttcagtgttttctaacagcgcgcgcgccgcagcctgggcgtaagggccgccggagccgatagcaataagatcgttttctggctgcaccacgtcaccgttaccggtgatgataaggcttgcagtttcatccgcgactgccagcagtgcttcaagtttgcgcagcatgcgatcggtacgccagtcttttgccagctcaacggcggctttgaccagatggccctgatgcatttccagtttacgttcaaacagttcgaacagcgtaaaagcatccgcagtaccgcccgcaaagcccgcgatgactttgtcgttgtacagacggcggacctttttcacgttgcctttcattacggtattgcccaacgtggcctgaccatcaccagcgatgaccacatggccgttacggcgtacgcttactatagttgtcacgagctgaccccttggttacgaatacagagtacaaaccccgtacaaaagtacggggcataatgcaattatagatgggggggattttgagggtttcaacccccggcggcgagccgaatgcagtttgtatgacccgccatcttcaaccgattgagggtgctgtctgcgttctctttgcctttcaccgggccaatgaccacacgattccagccattgttggtggtgattttgctgtcaaagccttcgaacgccagctgagcacgtaccgtctctgcctgttccgcgcctctgaagctaccgcactgcaccatccagcggcgttcgtcttttttctccgccgtcggttttggcgcgtcagcggcacgagcaactggcgcagcttgctgcggcttgctctgcgcagtcgtgtgcgcaggagtttgcagcagatcctggtacggctgctgagaagaagccggtttagactggcgcggttgcgcctgtaccggtgcggcttggctcgtacgcgtctgctgctgccagctttgttcagtcgtacggctctgctgagccaggcgttgctgttccgctaattgctgcgcctgacgttggcgctgtagcgtttgctgacgctgttccggcgtctgttcattccacggaacttcaaccagctgcgttggctgctggcgcatatcagcctgcatttgttcaagaagctgacgttgttctggtgtcagttgctccggcgttttcacttcaccaccggcagaaggttctgtgggcgcacgcactcccggctggcgactttccagctctttaatgtagcgccagcgttcttctggttttggtggtagtccgtttccggtcactttctggctttgcagcgtctcggactcttctttcttgtgatgcgtaatgaagtacagaccaccgataaaggtcacaagaacggcggcagcaatagcgaccatagcgggagaaaccgcaggcagatttcgttgctttttccgactggtgctcttttttcgccggctaggtgccggttggctgcggcgtacataatctcgttgtgccactatcgtttcgctgtatttattcgttcgtcagcccgccatgttacttaagcggcgggcctttgaccagtcacggcagtcttaaaggtttactttaaggtaacgcgcgtgtacttccccggatgataagttcgcagtccattaaacgagagccactgccaacgtgttgcccctgcatttgatcaagcaataacagcatagcttcccgaccgatttcgtaacgcggctgcgcgatggttgtcagcggcggatcacaaaattgcgtcaggtcgatgttatcaaaaccgattatggaaaggtcttccgggactttcagcccctggcgttttgcctgagaaagtgcgccgagcgccatcacatcgctatggcagaagacagcagtaggcggttgtggaagatcaagcagctgctgcatcgctttgcttccggcttcgaaggtgaagtcgccacgggcgatgtattgcggatcaaccataatgccgcagcgacgcagcgcctgaacatagccttgcaggcggtagtgacacagcggcatctcttcgggaccggctatacagccaatccgtttatgcccttgctcatataaataatttactgcatcaaatgcggcggtcagattgtcgatatgaactgtaggcagctccagctccggtgcaaattcgttcgccatcaccatcggcggcagattacgctgttcctcaatgctggcatcaaacggcagcctactacccagcaacaacatgccatcaatttgcttggtgatgatcaaatcgataaaggttttttcctgctgattttgatgcgcacagtcgccaatcagcaccagatatccgtgatttgccgccgtaacttcgataccgcgaataatttcgctaaagaagggatcgcagatatccgggacaatcaccagaatggtgcgggattcattacgcttgacgttgcgccccataggctgcggtaaataacccacttcccgggccgctttttcaacccgattacgggtggcctgggagactttatcgggattcattaatgctcgggagacggtcgctgtagagacttttgccttgagggcaacgtctttcatggtcgcggcagtttcctgcttcttcgctttcacactcactcctcgcctggcacgtcaggcgtactacatccatgtttacttcacatcggcaacatttttagcagatagcgcgtgaaaacggttacagaattttcatgaaaagtgtgatgaatattgaatttttcgatccgcctcgcatcgtgagcggtttaaccctcaatcggatcaacatccagcacccatttcaccttacgggaatccggtattgtattgatgagcgccagcgtaccgttaatgatgtgttgcaagcgcacgcgggaagggtgctgcaacaatatctgccagcgccagcgaccgccacgtttaggtgccagagccggaaccggaccgagaacccacagtttctcgtctgccagtgggctggagaggatcagattacgcagttgttgcaggaacaatggcgcgtgctgattgttatgatcttccgcacgcacaatcacatggctggtccacggcggtagctgcatcattcgccgctcagccagcgcctgttcggcaaaggcgtcgtagcctttatagagcaacgtttgcaacagaggatgttccggatggtgcgtttgcagcaccacttcgccctgtttacccgcacgcccggcacgaccggcgacctgggtgtaaagctgagcgaaacgctctgcgctgcgaaaatcggcagaaaacagcgcgccgtccacgtccagtaatgcaaccagcgtcacatccgggaaatggtgacctttcgccagcatttgtgtaccaatcaaaatccgcgcgccgccgcgatgtacttctgccagttgctgttccagcgcccctttgcggctggtggtatcgcggtcgatacgagaaatgggcacgccggggaacaacggcgcgagcgtctgttcaagctgttcggtgcccagccccacggggaccaggtgcgtggaaccgcaggaagggcactggcgcggcaccggacgctgactgtcacagtggtggcagcgcagatggtgctgcgcctgatgcagcgtgtagtagtgatcgcaacgtgggcattcggcaatccagccacagtcgtggcacagcagtgcaggcgcaaagccacggcggttaagaaagagaatgacctggttatcagcctgtaaatgctggcgcatacgagtgattaacgccggagccagacctgcctgcaccttctgaccttttaaatccagcacatgttgaattgccggacgcgcattccctgcccgacgggtcaggcgcagcaggcggtattttttctgctggacgttgcataacgtttccagcgcgggcgttgcggagccaagaataatcgggatttgctcgctgtgcgcacgatacaccgccaggtcgcgggcatgatagcgccagccttcctgctgcttgtaggagctgtcgtgctcttcatcaatgacaatcacgccgagatttttaaacggcgtaaacagcgcggagcgggtgccgatcacaatcgccgcctcaccatttttcgctttcagccacgcgctaagacgctcgctgtcgttcaggccggaatgcagaacttccacgggggcattaaaacgttcacgaaaacgggcgatagtttgcggtgtcaggccgatttccggcaccatcaccagcgcctgtttgccctgagcgagcacgttttccagtacgctgagataaacctccgttttaccggaaccggtaacgcccgccagcagccaggcagaaaaagtatctgccgcgctatgaattgcgccaacggcggtggcctgttcggtattcaatcgcaaccgctcaccagaaacggcatagttcgttcgccagtcgctaaactctggtgtttcacttgctaaatcacacagaccttttttgcgtagcgcctgcaacgcggcatcattaaattcgagcgtggcgacctggtcgcgccagattttgccttgccgtaacgccgccagcgcctgttgttgcttgggggagcgtttcaggctgttcagatccaccgcctggccttgttcagtggcaaaccagtaccacatcggcgcgttcgccgcaggccgcccctggcgtagtaaaatcggcaaggcatgaaacagcacatcgccaatcggatgatgatagtaatctgccgcccatagcagcaatcgccagacggagtgagtaaacaccggctcactatccagcacttcgactaccgcttttagctcattgagcggcagttcgctggcatcgctaacacttaccacaatcccgatgcgctcctgctgtttgccaaacggcacgcgcacgcgacacccagctttaaccgtcatgccttctggcagcagatagtcaaaggtacgaggaagcggaacgggcaaggcaacgtgggcaacgggcatagcatcatcctgacttgaaattcggtgggttagtatacacattgccgtagaagagtgcggatcagtttgcatacgctggttaatttctgtatgatttcgcgccttcgtacgaaatgatcgtattgaagctatacttttaacatcgcgtggtgtctggcgttagggctggaagagcgacgcggccttaaaccgaggttttcccatgaaaaaagatattcacccgaaatacgaagaaattactgctagctgctcttgcggtaacgtaatgaaaatccgctccaccgttggtcatgacctgaacctcgacgtgtgcagcaagtgccacccgttcttcactggcaaacagcgtgatgttgctaccggtggccgtgttgaccgcttcaacaagcgtttcaacatcccgggcagcaaataagaccggatttccgaaaaaagcgccgcacggcgctttttttgtgcctgaattttggtcgtattaccagctaaacagcggccattctttggcgaccgtggtgagttgtggcgcatcgaaaacggcttgtgggctgaccaccgtttcctcaagcggaatattcttgccgtaacgttctttgagctttgcctgaacttgtgggctgctcaggtcgaactctttcaacttctgctgctcgcccacgcgcattcccagcgcgttctggtaaaccttccacaccacttcgctacagtactggcgatcgtcgctccaactgaagctgaaatcatacggtttaccgagataacgttttgccgtttgcgccagtttttgctgttgttcaacactcagtccgccttcaacgcggcgaacaacgtatttgcccttttcaccatgggcgatccactgcttgagcggggtgtatttcaccgggccgactgcttcaaaaacgtagggctttttgttgcgtatcaccagcataccggtgtggctataatcggtatgggtcgccagttggatcgctttactttggctactgcgagagatctgaaagatgatgtcgccggtttgtggctgccaggcaaaggcaggtacagaaaccagcaggctgaggatcagcagcctgtttttcatagttaaacgtccatgtataaaaagcggtgggtcgcagacaacgtgctcgttgtttatgccggatgcggcgtgaacgccttatccggcctacaagttcgtgcaaattcaataaattgcaatatgacgtaggcctgataagcgtagcgcatcaggcgattccactccgcgccgctcttttttgctttagtattcccacgtctccgggttaatccccatctcacgcatgatctcttttgccgcttccgggatttcgtcgctgcgctctttacgcagatcggcatcatccggcaaaggttgcccggtaaaggcatgcagaaacgcttcgcacagcagctcgctgttggtagcgtgacgcaggttgttcacctgacgacgcgtgcgttcatcggtgaggatttttaacaccttaagaggaatggaaaccgtaatctttttgacttgttcactcttcttgccgtgctcagcgtatgggctgatatattcgccgctccattcagccatgagatacttaatcctcttcgtcaataaattgagaccagaccacacagttgatgtgggtactgaccgtaaacccgcatagtttaccgtacaggcgttaccgtgacatcgtgtaatgcacctgtcggcgtgataatgcatataattttaacggctatttgggatttgctcaatctatacgcaaagaagtttagatgtccagatgtattgacgtccattaacacaatgtttactctggtgcctgacatttcaccgacaaagcccagggaacttcatcacatgacgcgtaaacaggccaccatcgcagtgcgtagcgggttaaatgacgacgaacagtatggttgcgttgtcccaccgatccatctttccagcacctataactttaccggatttaatgaaccgcgcgcgcatgattacagccgtcgcggcaacccaacgcgcgatgtggttcagcgtgcgctggcagaactggaaggtggtgctggtgcagtacttactaataccggcatgtccgcgattcacctggtaacgaccgtctttttgaaacctggcgatctgctggttgcgccgcacgactgctacggcggtagctatcgcctgttcgacagtctggcgaaacgcggttgctatcgcgtgttgtttgttgatcaaggcgatgaacaggcattacgggcagcgctggcagaaaaacccaaactggtactggtagaaagcccaagtaatccattgttacgcgtcgtggatattgcgaaaatctgccatctggcaagggaagtcggggcggtgagcgtggtggataacaccttcttaagcccggcattacaaaatccgctggcattaggtgccgatctggtgttgcatagttgcacgaaatatctgaacggtcacagtgacgtagtggccggcgtggtgattgctaaagacccggacgttgtcactgaactggcctggtgggcaaacaatattggcgtgacgggcggcgcgtttgacagctatctgctgctacgtgggttgcgaacgctggtgccgcgtatggagctggcgcagcgcaacgcgcaggcgattgtgaaatacctgcaaacccagccgttggtgaaaaaactgtatcacccgagcttgccggaaaatcaggggcatgaaattgccgcgcgccagcaaaaaggctttggcgcaatgttgagttttgaactggatggcgatgagcagacgctgcgtcgtttcctgggcgggctgagcttgtttacgctggcggaaagtttagggggagtggaaagtttaatctctcacgccgcaaccatgacacatgcaggcatggcaccagaagcgcgtgctgccgccgggatctccgagacgctgctgcgtatctccaccggtattgaagatggcgaagatttaattgccgacctggaaaatggcttccgggctgcaaacaaggggtaaaaatgagtgtgattgcgcaggcaggggcgaaaggtcgtcagctgcataaatttggtggcagtagtctggctgatgtgaagtgttatttgcgtgtcgcgggcattatggcggagtactctcagcctgacgatatgatggtggtttccgccgccggtagcaccactaaccagttgattaactggttgaaactaagccagaccgatcgtctctctgcgcatcaggttcaacaaacgctgcgtcgctatcagtgcgatctgattagcggtctgctacccgctgaagaagccgatagcctcattagcgcttttgtcagcgaccttgagcgcctggcggcgctgctcgacagcggtattaacgacgcagtgtatgcggaagtggtgggccacggggaagtatggagcgcacgtctgatgtctgcggtacttaatcaacaagggctgccagcggcctggcttgatgcccgcgagtttttacgcgctgaacgcgccgcacaaccgcaggttgatgaagggctttcttacccgttgctgcaatagctgctggtgcaacatccgggcaaacgtctggtggtgaccggatttatcagccgcaacaacgccggtgaaacggtgctgctggggcgtaacggttccgactattccgcgacacaaatcggtgcgctggcgggtgtttctcgcgtaaccatctggagcgacgtcgccggggtatacagtgccgacccgcgtaaagtgaaagatgcctgcctgctgccgttgctgcgtctggatgaggccagcgaactggcgcgcctggcggctcccgttcttcacgcccgtactttacagccggtttctggcagcgaaatcgacctgcaactgcgctgtagctacacgccggatcaaggttccacacgcattgaacgcgtgctggcctccggtactggtgcgcgtattgtcaccagccacgatgatgtctgtttgattgagtttcaggtgcccgccagtcaggatttcaaactggcgcataaagagatcgaccaaatcctgaaacgcgcgcaggtacgcccgctggcggttggcgtacataacgatcgccagttgctgcaattttgctacaccagtgaagtggccgacagtgcgctgaaaaacctcgacgaagcgggattacctggcgaactgcgcctgcgtcaggggctggcgctggtggcgatggtcggtgcaggcgtcacccgtaacccgctgcattgccaccgcttctggcagcaactgaaaggccagccggtcgaatttacctggcagtccgatgacggcatcagcctggtggcagtactgcgcaccggcccgaccgaaagcctgattcaggggctgcatcagtccgtcttccgcgcagaaaaacgcatcggcctggtattgttcggtaagggcaatatcggttcccgttggctggaactgttcgcccgtgagcagagcacgcttagcgcacgtaccggctttgagtttgtgctggcaggtgtggtggacagccgccgcagcctgttgagctatgacgggctggacgccagccgcgcgttagccttcttcaacgatgaagcggttgagcaggatgaagagagcttgttcctgtggatgcgcgcccatccgtatgatgatttagtggtgctggacgttaccgccagccagcagcttgctgatcagtatcttgatttcgccagccacggtttccacgttatcagcgccaacaaactggcgggagccagcgacagcaataaatatcgccagatccacgacgccttcgaaaaaaccgggcgtcactggctgtacaatgccaccgtcggtgcgggcttgccgatcaaccacaccgtgcgcgatctgatcgacagcggcgatactattttgagcatcagcgggatcttctccggcacgctctcctggctgttcctgcaattcgacggtagcgtgccgtttaccgagctggtggatcaggcgtggcagcagggcttaaccgaacctgacccgcgtgacgatctctctggcaaagacgtgatgcgcaagctggtgattctggcgcgtgaagcaggttacaacatcgaaccggatcaggtacgtgtggaaagcctggtgcctgctcattgcgaaggcggcagcatcgaccatttctttgaaaatggcgatgaactgaacgagcagatggtgcaacggctggaagcggcccgcgaaatggggctggtgctgcgctacgtggcgcgtttcgatgccaacggtaaagcgcgtgtaggcgtggaagcggtgcgtgaagatcatccgttggcaagtctgctgccgtgcgataacgtctttgccatcgaaagccgctggtatcgcgataaccctctggtgatccgcggacctggcgctgggcgcgacgtcaccgccggggcgattcagagcgatatcaaccggctggcacagttgttgtaatttcagaaatttaataatgcccggtactcatgttttcgggtttatggtttctaatgaaatatattgaattatcataggattaggccggattaagcgtttacgacgaatccggcaagaagcaataagtacatggttagtttatatttgcagtccggtttgctttgcataccggattttctttttcttaccatcctgaagttttttcatcttccctgatttttcctcaccatcattggtcatttttcggttgacgcccttcggcttttccttcatctttacatctggacgtctaaacggatagatgtgcacaacacaacatataactacaagcgattgatgaggtaaggtatgagcttttttcacgccagccagcgggatgccctgaatcagagcctggcagaagtccaggggcagattaacgttagcttcgagtttttcccgccgcgtaccagtgaaatggagcagaccctgtggaactccatcgatcgccttagcagcctgaaaccgaagtttgtaagcgtgacctatggcgcgaactccggcgagcgcgaccgtacgcacagcattattaaaggcattaaagatcgcactggtctggaagcggcaccgcatcttacttgcattgatgcgacgcccgacgagctgcgcaccattgcacgcgactactggaataacggtattcgtcatatcgtggcgctgcgtggcgatctgccgccgggaagtggtaagccagaaatgtatgcttctgacctggtgacgctgttaaaagaagtggcagatttcgatatctccgtggcggcgtatccggaagttcacccggaagcaaaaagcgctcaggcggatttgcttaatctgaaacgcaaagtggatgccggagccaaccgcgcgattactcagttcttcttcgatgtcgaaagctacctgcgttttcgtgaccgctgtgtaagcgcgggcattgatgtggaaattattccgggaattttgccggtatctaactttaaacaggcgaagaaatttgccgatatgaccaacgtgcgtattccggcgtggatggcgcaaatgttcgacggtctggatgatgatgccgaaacccgcaaactggttggcgcgaatattgccatggatatggtgaagattttaagccgtgaaggagtgaaagatttccacttctatacgcttaaccgtgctgaaatgagttacgcgatttgccatacgctgggggttcgacctggtttataaatagtgtggcttttgtgaaaatcacacagtgatcacaaattttaaacagagcacaaaatgctgcctcgaaatgagggcgggaaaataaggttatcagccttgttttctccctcattacttgaaggatatgaagctaaaacccttttttataaagcatttgtccgaattcggacataatcaaaaaagcttaattaagatcaatttgatctacatctctttaaccaacaatatgtaagatctcaactatcgcatccgtggattaattcaattataacttctctctaacgctgtgtatcgtaacggtaacactgtagaggggagcacattgatgagcacgagtgacgatatccataacaccacagccactggcaaatgcccgttccatcagggcggtcacgaccagagtgcgggggcgggcacaaccactcgcgactggtggccaaatcaacttcgtgttgacctgttaaaccaacattctaatcgttctaacccactgggtgaggactttgactaccgcaaagaattcagcaaattagattactacggcctgaaaaaagatctgaaagccctgttgacagaatctcaaccgtggtggccagccgactggggcagttacgccggtctgtttattcgtatggcctggcacggcgcggggacttaccgtagtatcgatggacgcggtggcgcgggtcgtggtcagcaacgttttgcaccgctgaactcctggccggataacgtaagcctcgataaagcgcgtcgcctgttgtggccaatcaaacagaaatatggtcagaaaatctcctgggccgacctgtttatcctcgcgggtaacgtggcgctagaaaactccggcttccgtaccttcggttttggtgccggtcgtgaagacgtctgggaaccggatctggatgttaactggggtgatgaaaaagcctggctgactcaccgtcatccggaagcgctggcgaaagcaccgctgggtgcaaccgagatgggtctgatttacgttaacccggaaggcccggatcacagcggcgaaccgctttctgcggcagcagctatccgcgcgaccttcggcaacatgggcatgaacgacgaagaaaccgtggcgctgattgcgggtggtcatacgctgggtaaaacccacggtgccggtccgacaagtaatgtaggtcctgatccagaagctgcaccgattgaagaacaaggtttaggttgggcgagcacttacggcagcggcgttggcgcagatgccattacctctggtctggaagtagtctggacccagacgccgacccagtggagcaactatttcttcgagaacctgttcaagtatgagtgggtacagacccgcagcccggctggcgcaatccagttcgaagcggtagacgcaccggaaattatcccggatccgtttgatccgagcaagaaacgtaaaccgacaatgctggtgaccgacctgacgctgcgttttgatcctgagttcgagaagatctctcgtcgtttcctcaacgatccgcaggcgttcaacgaagcctttgcccgtgcctggttcaaactgacgcacagggatatggggccgaaatctcgctacatcgggccggaagtgccgaaagaagatctgatctggcaagatccgctgccgcagccgatctacaacccgaccgagcaggacattatcgatctgaaattcgcgattgcggattctggtctgtctgttagtgagctggtaagcgtggcctgggcatctgcttctaccttccgtggtggcgacaaacgcggtggtgccaacggtgcgcgtctggcattaatgccgcagcgcgactgggatgtgaacgccgcagccgttcgtgctctgcctgttctggagaaaatccagaaagagtctggtaaagccagcctggcggatatcatagtgctggctggtgtggttggtgttgagaaagccgcaagcgccgcaggtttgagcattcatgtaccgtttgcgccgggtcgcgttgatgcgcgtcaggatcagactgacattgagatgtttgagctgctggagccaattgctgacggtttccgtaactatcgcgctcgtctggacgtttccaccaccgagagtctgctgatcgacaaagcacagcaactgacgctgaccgcgccggaaatgactgcgctggtgggcggcatgcgtgtactgggtgccaacttcgatggcagcaaaaacggcgtcttcactgaccgcgttggcgtattgagcaatgacttcttcgtgaacttgctggatatgcgttacgagtggaaagcgaccgacgaaagcaaagagctgttcgaaggccgtgaccgtgaaaccggcgaagtgaaatttacggccagccgtgcggatctggtgtttggttctaactccgtcctgcgtgcggtggcggaagtttacgccagtagcgatgcccacgagaagtttgttaaagacttcgtggcggcatgggtgaaagtgatgaacctcgaccgtttcgacctgctgtaatctgaccccgttcagcggctgcttgctggcagtcgctgaacgttctttaccagcgtatagtgggcgaacgaaaactacacactggatctctcatgtctgccgcaggaaagagcaacccactggcaatcagtggcctggttgtgctcacacttatctggagttatagctggattttcatgaagcaagtcaccagttacatcggtgccttcgactttaccgccttacgctgcattttcggcgctctcgttttattcatcgtccttttattacgtggtcgcggaatgcgcccgacaccgtttaaatacaccttagccattgccctgttacaaacctgcgggatggttggtctggcgcagtgggcgttggtcagcggaggtgcggggaaggtggcgatcctgagctataccatgccgttctgggtggtgattttcgccgcgttgtttctcggtgaacgcctgcgacgtgggcaatatttcgcgattctgattgccgctttcggcttatttttggtgttgcagccgtggcaactcgatttctctagcatgaaaagtgccatgctggcaatcctctccggcgtcagttggggggcgagcgcgattgttgctaaacgtctgtatgcccgtcatccgcgcgtggatttattgagcttaacatcctggcagatgctgtatgcggcgctggtgatgagtgtggtcgctttactggtgccgcaacgtgaaattgactggcagcccaccgtgttctgggcgctggcctacagtgcgattctggcgacggcactggcgtggagcttatggttgtttgtattgaaaaacttgcctgccagtattgccagcttaagcacactggccgttcccgtttgcggcgtactcttttcctggtggctgctcggcgagaatccgggggccgttgaaggtagcggtattgtgctgattgtgctggcactggcgctggtgagccgtaagaaaaaagaagccgtcagtgtaaaaaggatctgaattttttcttcatgtggggcgatctcttatttaacaaaataacgataatgccccaccatccgccagttaaacagcacatcttcttcctgcgcgcctgcgccaatgttatgtatcaccagcggcgtaccgtcgcgggcgaagccatcactaaccaccccaatatgtgccagcccgttatccagtcgccaggagacaatatcgcccgcttgatagtcactggggttcttgctggtggggcgtgttttatcatggcggctaaaccaggtttccagattaggcacccgacggtgatcgatgttgctgtccgggcgctttaacttccatttttgcgggtactcagcaaaattcttcgccatatcttcgtgaaccagtttctgcaaatcgaccttctggctgcgcaatgcgcggatcaccacatcggaacatacaccgcgttcttgcggaacatcaccgccaggataagtaagctgcacatacgccggatcgtaaaatagcgtgctgccaatttgctgtctggcaccgtctgcgatggcaaggttggtattggcctggatttgtaccacggttggtggaacggcgggagattttaaggagtggctggtaaatgccgttagcaggctgagcagcgccagactagctttcatctggttcgtccgtgaaaataagagtcacagattcgaccttccgggctaacgattgttctgtagagaaaatgtccagaagcggataaaaaattcctgaacaacgtgggagtttcagattactggcacagagtgccggatgcggagtgaacgccttatccggcctacaaaagcacgcaaattcaatatattgcagagattgcgtaggcctgataagcgtagcgcatcaggcaattttgcgttcaaactcccggacaagccgggagtttggagtaggttattcccactcttgcaggaaacgctgaccgtactggtcggctaccagcagagcggcgtaaacctgatctggcgtcgcgccgccaggcatgttgtgaatggtttcaccttctgcacatgccgcttctgccacaattcgcattttcgccgggacatcttctttaatatccagttgagcgagagttattggcaaacctaccgcatggctaagggcagctacggtttcgatttcctccaccggcgcattttccagaaccagctgcgtcagcgtaccgaatgccactttttcaccgtgataatagtgatgcgcgtccgggatagcggtcaggccgttatgcactgcgtgcgccgcagccagaccaccactttcaaaaccaacaccgctcaaataggtgttcgcttcaatcacgcgctccagcgccggagtcactacatgctgttcggcagcaagcatcgctttttcgccttcttccagcagggtgttgtagcacagttcagccagtgccagcgcagcctgggtgcacttgccgcccgccatggtggtcgcgccgctacgagagcaggcacgcgcttcaaaccaggttgccagcgcatcgccgatacccgccgctaacagacgtgcaggtgcgccagcgacgattttggtgtcgacaatgaccatattcgggttatttggcaacagcagatagcggtcaaactcaccctcatcggtgtagataacagacaatgcgctgcacggtgcatcggtagaggcgatagtcggtgcgatcgctaccggaacacccatgaaatgtgccagtgctttggcagtatcgagggtttttccgccaccgataccgagaattgcgccacactgcgcagtctccgcgatgccacgcagacggtcgatctcattttggctacattcaccgccaaacggcgcaatttctactaccagtccagcatctttaaagcttttctcgacagtggattgagcaaaacctaaaacaaatttgtcacccaccactaaccagcgttctgccagcggcttcaggtattcgcccagacgattaatcacatcagcgccctggatgtatttacccggactttgaataatgcggtccataattgctcctttagagatgagtagtgccaaatgcggcattccagtcgtgttcgaacttctctatagcactctctaccgcaggggtgttgagcatttgttgcgctacatctaagggcagggtgatggattcacatcctgccagtaaacagtccagcgcctgacgcggcgttttaaagctggctgccagcaccatgctttctggcgcgtgcatttctaacagcgtttgcagctcctgaaccgtacgaatgccgtctccgccctgggcatctacgcggttaacatacggagcaacgtattttgcccctgccagtgcggctaataacccttgtgcggcgctatatacagcagtgccaagtgtagtaataccctcttttttcagtattttaattgctgccagaccttcggaagtcaccgggattttcaccacaatacccggaatagcgtcgcgcaggcgcttcgcttcttccaccatcccctgcgcgtcgcggctcatggtctgagcaaacagaatgccctcatcaccaatcgctttttgcagacgcggcagcacttcccatatggactccttgctggcagcgataatgctcgggttagttgtcaccccggcaatggggaatatgcgtgccagacgttcgacttctgcgacgttagcggtgtccagatacagttccatgatgtttccttttacagttccagttcatgttgcagcaggctggcgatagcgtcggcagaggcggcgttaaccagcgcgttacggaattcttcgtgcatgatgcggcgagcgaggcggctgaaaatgcgcatatgctgatcgcccgcagcgtgtttgttcagggttaacataatgatgaattgcgcttcatcatcgccccagcgcaccggcgcttgcagacgcgccacgctgatggtggattgctcaatgtgttcacttttgctgtgtggaatggcaaaactaaagcccagaccggtagagaaaacggcctcgcgcgcccacaagtcggcttccagtttacgcggatagcggcagcggcccgccagcagcaggttatcggtcatgcctttgagcacttcttctttgctgcgccagtcgctttccagtgtgatgcactcggcggtgaccagcggtgcgtcttgttgggtcatgcggaattgcgccagcaggtgttctacttccaggctagtacggcaggccattgcctggttgagcaacttgcggcactcacggctatcaagttgcgccatccgagctttcgccgccggaatacttggtgcgctcatgctgagttcatccagccctaagccgaccagcaacggcagcacggaacctttcgctcccagctcaccgcacagaccaatccatttgccctggcgatgcaccgcttgcacggcgtaatcgagcgcccgcaagaatgccggattcaggctgttgtagtgacgagtaaccttagcgttatcgcgatccaccgccagcagatactgcgtcaggtcattactaccaatactaaagaaatcaatctcttcgcagcattgatcgatgatgaacatcacgctcggcacttccagcatgatgccgagctggattttctcatcaaacggaatgtgttcgttacgtagttgctgtttggcttccgccagtttttctttcacccataagatctcttccatactggagatcatcgggatcatgattttcaggctgccgtgagcggaggcgcggaggatgctccgtagctgcgtggtaaacaagctcgcgtactcttcataaatacgcacggcgcgataaccgaggaacgggtttgcctctgcgggaatgttcagataatcaacgggtttgtcgccgccaatgtccatagtgcgcacaataatgctgcgtccgttggcggattccagcgcctgacaaaaaatgttgtacaactcgctttcgcccggtgcgctggtgcgatccatatagagcatttcagtgcggaacaaaccaacgccttccgcaccattgccgaatgcggcctgcgcttccacggagtgagcgatgttagcggcaatttcaatgcggataccgtcagcggtacgggcttgttgggtcagccagacacgctgttgctcacgcagggcgtcctgtacgcgggcttcttgctgataataacgagctacggcttcccctggctcaaccacaatcgccccggcgttgccgtcgatataaatcgtttgttgctgccacggagtaagggcatcaatatccacaccaaccagcgttggaatgttgaagctacgggcaaggatcaccgtatgactggtggtgccgccgcttttgagcaacaatcctttgaggtgatttttatccagttcgaggaactggctgggggtcagttcatcagccatacaaatggcgggctgcgtcagtttgcccggtgccgggaagcgttgctcaccgtagatttgctggagtaactggaagcagacgtcgcgtacgtccagggcacgttcttgcaggtagctgctgctggaacgggaaaactcttcgcaaaagtgattcgcgctggcaacaattgcttcggcgcagcttaatccggcgctgacgcctgccagtaaatgttcgcgcagggaagtatcgccagccagggatcggtgagcttccagaatcgcgctggtagcaccgtcgctatccagcagacgaaactcaatgtttttcagtaccagcgtcaggccgttttccagtgcggattgctcggcgtcaacgcctttggctgcgggaagattacccagcgcattgagatctaaagaagagatcggcgtcagaatgccgcctgcactaccgctgcacacggtgcgggcgcggataatttgcggattcagattggtcagactaaccggcagtggttccagttcgtcagatttaacttccgccagcggcgcatcgcagtgggggaattcatcgcgcagccattggcttaaacgctggtgcgcttcctgttcgtcggccccggaaatcagtaactggcagttatcgcccgccagcgtatcggtgccaatcagcgcaagggcgcttttggcgttgcccttgcggtcagtgcgcaggttatgccactcaatttgactactaaaagtattacacagcgtttcaacgtggcttgccggacgcgcatgtacgccgttaggtagctcacaaataaattccacaatcagggccattgcctctctcccggtacggttttctgtttacaggataagagcgcacggcaacggcctgccatgtgacaaatctgccaaaagctggacaaatgtaatgtaaccgtcaatttgcgacgcgtctcacaagacgctgttttgcggcatgcttccggtttatcgcaagttatgaggcggatcgcatttttgtactgatattacaaaagtccagtaaatggcctttttatccactgtttgctccgcctgcgattgcctattgtttcctccatcaaaaatatggacatgggctttcgcaagcccgggagcagcttatgaatgagttggtgcagatcctgaaaaatacccgtcagcatttaatgacgggcgttagtcacatgattcccttcgtggtaagcggcggtattttgctggcggtttccgtcatgttgtatggcaaaggcgcagtgccggatgccgtagccgatccaaatctgaaaaaactgtttgatatcggcgttgcgggcttgacgctgatggtgcctttcctcgcagcgtacatcggttattccattgcagagcgttctgcgctggctccgtgcgctatcggtgcctgggttggtaacagctttggtgcgggcttctttggtgcactgatcgccgggattatcggcggcatcgtggtgcattacctgaagaaaattccggtgcataaagttctgcgcagcgtgatgcctatcttcattattcctatcgtcggcacactgattaccgcaggcatcatgatgtggggcttgggcgagcctgtaggggcgttgaccaacagcctgactcagtggcttcaggggatgcagcagggcagcattgttatgctggcggtgatcatgggtctgatgctggcgttcgatatgggcggtccggttaacaaagtggcctatgccttcatgctgatttgcgttgctcagggtgtttataccgtggtggccatcgctgccgtgggtatttgtatcccgccgctggggatggggctggcgacgctgattggtcgtaaaaatttctccgcagaagagcgcgaaaccggcaaagcggcactggtgatgggctgtgttggcgttactgaaggggcgattcctttcgccgctgccgatccgctgcgtgtcattccttccatcatggtcggtagtgtttgtggtgcagtaactgcggcgctggtcggtgcgcagtgctatgcaggctggggtggtctgattgtgctgccggtggttgaaggcaagctgggttatatcgcagcagtggctgtcggagcagtggtgacggctgtttgtgtgaacgtgctgaaaagtctggcgcgtaaaaatgggtctagcactgatgaaaaagaagacgacctggatttggattttgaaattaattaattgaggaacgagccatgacgaaaattattgcagtaaccgcatgtcctagtggtgttgcccatacctatatggcagcagaggcgctggaaagtgccgcgaaagcgaaaggctgggaagtgaaagtagaaacccaggggagtattggtctggaaaatgaactgactgcggaagatgtggcgagcgctgatatggtgattctgaccaaagatatcggcatcaagtttgaagagcgttttgctggcaagaccatcgtgcgcgtcaacatcagcgatgcagtaaaacgtgctgacgccattatgagcaaaattgaagctcacctggcgcaaaccgcttaagttcttctcccgctcgcaagggcgggttcgctttcccacaggagttcctcatgacgaatcgtatctctcgcctcaaaactgcactgtttgccaatacccgtgaaatcagcctggagcgggcgctgctttataccgccagccatcggcaaaccgaaggcgaaccggtgatattgcgccgggcgaaagcaacagcgtatatccttgaacatgttgaaattagcattcgtgatgaagaactgattgccggtaaccgcaccgtaaaaccgcgcgccgggattatgagcccggaaatggacccttactggctgctgaaagagctggatcaattcccgacgcgtccgcaggaccgctttgctatcagcgaagaagataaacgtatctaccgtgaagagttgttcccgtactgggaaaaacgtagcatgaaagatttcatcaacgggcagatgacagatgaagtaaaagccgcgaccaacacgcagattttcagcatcaaccagacggataaaggccaggggcacattattattgattacccacgcctgttgaatcacgggctgggtgagctggtggcacagatgcagcaacattgtcagcaacagccggagaatcacttttatcaggccgcgttgttactgctggaagccagccagaaacacattttgcgttacgccgaactggcggaaacgatggcggcaaactgcacagatgcccagcgtcgcgaagagctgctgactattgcagagatctcccgccataacgcgcaacataagccgcagacgttctggcaggcgtgccagttattctggtacatgaacatcattctgcaatacgaatccaacgccagtagcctaagcttggggcgcttcgaccagtatatgttgccgttctatcagacaagtttaacccagggcgaagatgcggcgttcctgaaagaactgctcgaatctttatgggtgaaatgcaacgacatcgtgctgttgcgctccaccagtagcgcgcgttatttcgccggtttcccgaccggctataccgcactgctcggcgggttaaccgagaacggacgtagcgcggtgaacgtgcttagcttcctttgccttgacgcctatcaaagcgtgcaattaccgcaaccgaacctcggcgtgcgcactaacgccttgatcgacacgccgttcctgatgaaaaccgccgaaaccattcgcttcggtaccggtattccgcaaatctttaacgatgaagtggtggtgccagcgttcctcaaccgtggcgttagcctggaagatgcgcgcgactattccgtagtgggctgtgtggaattatctattcccggcagaacctacggcttgcatgacatcgcgatgtttaatctgctgaaagtgatggaaatctgcctgcatgaaaatgaaggcaatgctgcgctgacttatgaaggtttactggagcagatccgcgccaagatcagccactacatcaccctgatggttgagggcagcaatatttgtgatatcggccatcgcgactgggcacctgtaccgctgctcagtagctttatcagcgattgtctggaaaaaggccgcgatattaccgatggcggcgcgcgttataacttctccggcgtacaggggatcggtatcgccaacctgagcgattctctccatgcgttgaaagggatggtttttgagcaacagcgtttaagttttgacgaattgctgagcgtattaaaagccaacttcgcaacgccagaaggcgaaaaagtccgcgctcgcttaattaaccgcttcgagaaatacggtaacgatatcgacgaggtggataacatcagcgccgaactgttgcgccactactgcaaagaagtggaaaaataccagaacccgcgcggcggctacttcacgccgggaagctataccgtttctgctcacgtcccgttgggaagcgtggttggcgcgacgccagacggtcgttttgccggagaacagctggcagacggcggcttgagtcccatgctgggccaggacgcacaagggccaacagcggtactgaagagtgtcagtaagctcgataacacgctgctgtctaacggtacgttgctgaacgtgaaattcactccggcgaccctggaaggtgaagcaggattacgcaaactggccgacttcttacgggcgtttacccagcttaagttacaacatattcagtttaacgtggtgaacgccgacacgttgcgggaagcgcaacagcgcccacaagattatgccgggctggtggtgcgcgttgccggatacagcgccttctttgtcgaactgagcaaggagatccaggatgacatcatccgccggacagcgcatcagctgtaattaaactgtcgaaggagatccaggatgacaagttccgccggacagcgcatcagctgtaacgttgtggaaacgcgccgcgatgatgtggcgcgcattttcaacattcagcgttatagtctgaatgacggcgagggcattcgtacggtggtcttttttaaaggctgtccgcatctttgcccgtggtgtgctaatccggagagcatctccggcaaaatccagacggtacgcagagaggcgaaatgtctgcactgtgcgaaatgtttgcgtgatgcggatgaatgcccctccggggcgtttgaacggattggtcgcgatatcagccttgacgctctggaacgggaagtgatgaaagatgacattttctttcgcacgtccggcggcggcgtcacgctttctggcggcgaagtgttaatgcaggcggagtttgctacccgttttttacagcgactgcggctgtggggtgtgagttgcgccattgaaactgccggagacgcaccagccagcaagctattaccgctggcgaaattgtgcgatgaagtgttgttcgatttaaaaattatggacgcgactcaggcgcgggatgtggtgaagatgaacctgccacgcgtgctggagaatctgcgtttgctggtgagtgagggcgtcaacgtgatcccgcgtttaccgctgatccctggtttcacgctcagccgggagaatatgcagcaggcgctggatgtactgatcccgctgaatatcaggcagatccatctgttaccgtttcatcagtacggcgaaccgaaataccgcctgctggggaaaacatggagcatgaaagaggtgcctgcgccgagcagtgctgatgtggcaacgatgcgcgaaatggcagaacgggccggacttcaggttaccgtgggaggttaaaatggcatacctggtggcagtaaccgcctgcgtaagcggcgtggcgcatacttatatggcggcggaacggctggaaaagttgtgcctgttagagaagtggggagtcagcattgaaactcagggcgcgctgggaacggagaatcgtttagcggatgaggatatccgccgggcggatgttgctctgttgattacggatatcgagcttgccggtgccgagcgatttgaacattgccgctatgtgcaatgcagcatctacgcattcctgcgtgagccgcagcgggtaatgagcgcggtgcgcaaagtgctttctgcgccgcagcaaacccatcttattctggagtaattattctggagtagtcggtttttctgtcagttggctgtggtactgccggcgatattcgctcgggctgcgttcggtgtttttacgaaacagacggcagaagtagttgctgtcgacaaagccgcaggcgtgcgccacttcttttaccttcaggtcatagcctttcaataacgtcttagcgtgctccagtcgcgtgtgattcaggtattcgttaaaaccaatggcccccgttttttgaaacaggtggctgaggtaatttgggctaatataaaacgcctgtgcaacagattcgcgggtaagcgcggaggcatagcgttcgtcgatataatcgcgaatagcttcaaatagtgcctggctgcgactggcggtctggatttggctgccaagcaaatcgcggcagtggctaagcaggctggcgacgataagccttgccgtttgctgctcctgcggctgcatttgcatttcattgagcgtttgtagcagaaaagaacctatgcgtgggccgcgtcgggcgacgtgttgcttcgccagattttgatattgtttgccatcccattgcacgacgctgaagccgagttgctgtttgccaaacagcacgctaaaggtagtagcgggggcttgccattgtggaaaattccagccaccagcaggaacgtacagcacatcgccgggaactaacgttgctccagcgccggtatcaacaaactcaccttccagcacaatttccagccgtggaaaatcgacctgatacgcaagatcgggcaccgggccgttactgctggcaaagtaaatctggcgcagggacagcgggccgttgatcaggcgggagagcagatagctgacgtcgtgatacatgttattcccttaggtatgtagacgggaaaacagtaactggcattattaaaaaaggccacctgaaaagtgtggcctgaggggagttcgatgtaaacattgcggcagttgtattgccggatgtggcgtaaacgccttatccagcctaccgccgcgatctgtaggccggataagacgcgtcaagcgtcgcatccggcaaatagcgcctggctgataattactgattacccacctgatcgccatagggcagtgtgtcgtaatcgatcagtgcgtttttcttatacgggttaccaatccagcgggtagtttctttgaactgcggattcaccacactacgggttggatcgtaaccgtcgtaagataagcccgccaaatcactccaggtgtggatcagttccgccaggctgtatttacgatcaacatcctggctgaaatcacggggatgagtcgcttgccatttttcactcgtccacagcaggaacggaatggtgtacatatgacgcgtcgggttgtcctcattacgcccctgagttttgtgcggcggcgtgtcgtaaacctcttcaccgtggtcagagaaataaaccaggaaaccgttcgggtttgctgctttaaagtctttaatcaggctggcaaccacatgatcgttatacaggttagcgttgtcataatcgttataactctccagctcttccgcgtttaatcccggcggaacatgatcggtattgccatcaaacttgccctgattttccgggtagcggtatttgtatttgatatgcgtacccagcagatgaacaatgatcagtttcttcggcgcagggtcattcagcacttcctggaacggcttcagcacgttggtgtcgtattcacgcgcactctgcgtacgttgctggttcatgtagtactgcttgtcggtctggcggctaaataccgtcagcatggtattgcgggcggtcatcgtctgctggttggtgatccagaaggttttataacccgcctgtttcatcatgttcatcaggctcggctgcgtcagatacagatccgggttcttttcattggcaaaggtcagcgcctgttgcaggatttcaatggtgtacggacgagacgtaactacgttattaaacacggtcagattcggatcggttttatgcagcgcatccagctccggcgtggtttcacgcggataaccgtacagactcatgcgtccgcgctgggtgctctcgccaatcaccagcactaaagtgcgcggttcgttaccgctttcatctttgaaattagccagtggcggcaaggcattattttcattcagtaactttgttaggctgtttagttgctgacgatactgataatagccggtcaggaattgccacggtgcggcaggctccatacggctggccaggttatccaacgttttctcaaacggcttgtttttgataaacgtattcatggcgatcggatgcagaatcaagccataaagcagggcaaaagagacaacataacgccacggctttggaatatagaccgggcgcaggcgtgtccacagcagaactgccaccgccgtataggccagcgcgataagcacaattttcaggctgaaatactggcttaaatactcgctggcttcgttggtgttggtttcgaacatcacaaacagaacgctctggctgaactcctgaccgtagatgacgtagtagcacagcgccgccagagaggccgcccatagcaccacgccgattactgcggcaataattttaatccgcttcggaaagaggaataccgggatcaaccacaggctactgaataacaggctgtcgcgaatgccgttagtgccactataaccactgatgtaaataatggcctgtagcagagtagagaaaaaccaaaagtagagcagtgcccaacccagggctttccagctaaaaagaggtttagcctggacttctgtggaatgcatagtaagaacctgtcttgaaaaaatatcgccgaatgtaacgacaattccttaaggatatctgaaggtatattcagaatttgaataaaatgcagacagaaatatattgaaaacgagggtgttagaacagaagtatttcagaaaaccctcgcgcaaaagcacgagggtttgcagaagaggaagattagccggtattacgcatacctgccgcaatcccggcaatagtgaccattaacgcttgttcgacgcgaggatccggttcctggccttctttttctgcctggcgggagcggtgcagcaactcggcctgcaatacgttcagcgggtcggtgtaaatattccgtagctgaatagactctgcaatccacggcagatcggccatcagatgggaatcgttggcaatcgccagcaccactttgatgtcttcttcttgcaggttgcgtaactctttacctaacggccacagtgctttgtctaccaggcgttggtcatagtattccgccagccacaggtctgctttggcgaagaccatctccagcatgccgagacgcgtgctgaagaatggccaatcgcggcacatagcctccagctcgctctgtttgccgtcttcgaccactttttgcagcgccgtacctgcacccagccaggcggggagcatcagacggttttgcgtccaggcgaagatccacggaatggcgcgtagactctcgacgccgccggttgggcgacgtttcgccggacgactacccaacggcagtttgcccagttcttgttccggcgtagcggagcggaagtaaggcacaaaatctttgttttcacgtacgtagccgcggtagacatcgcaggagatgacactcagttcatccataatgcgacgccagctctctttcggctccggcggtggcagcaggttggcttccagaatcgccccggtataaaggctcaggctgctgacggtgatttctggcagaccatatttaaagcggatcatctcgccctgttcggttacgcgcaggccgcctttcaggcttcctggcggttgactcagcagcgccgcatgagcaggtgcgccgccgcgaccaatggaaccgccgcgaccgtggaacaacgtcagctcaatacccgctttttcgcaggttttgattaatgcatcctgtgcctgatattgcgcccaggaagctgccatcactcccgcatcttttgcactgtcggaatagccaatcatcaccatctgtttgccctgaatcaggccacgataccagtcaatattgagcagctgggtcatgacatcgttggcgttgttcagatcatcgagggtttcaaacagcggagcaaccggcatcgcaaacccgatacccgcttctttcagcagcaggtggacagccagtacgtcggacggcgttttcgccatgctgatcacgtaggcggcaatggagccttgcggtgcttcggcaatcacctggcaggtatcgagcacttcgcgcgtttcggcgcttggttgccagttgcgcggcagaagcggacgtttggagttcagttcgcggatcaggaacgcctgtttgtcggcctcactccagctttcgtagtcgccgataccgaggtagcgggtcagctcgcccagcgcttcggtatgacgcgtgctctcctgacggatatcaatacggaccagcggtacgccgaaacatttcacgcggcgcagggtgtcgagcagatcgccgttggcgataatacccatgccacacgcctgaagactctggtagcaagcgtagagcggttcccacagttcttcgttttgtgtcagcaggccttctggttttggcagttcttcgcctttcaggcgcgcttccagccatgcctgtgtcgccatcaggcgagaacgcaggtttttcatcagatagcgatacggttctgcggcaccttcttcgccaaccagcgccagcagttcaggggtcgcttcaaccatgctcagttcagaaaccagcacctgaatatctttcaggaacaaatcggtggctttccagcggctgagtagcaggacgtggcgggtgatatcggcagtgacgttcgggttgccgtcgcggtcgccgcccatccagctagtaaaacggaccggaacaaattcgacgggcagtttgtagccgaggttctcttccagttgttcgttcagttcgcgcaggtaatttggtacgccttgccacaggctgttttccactacggcaaagccccatttggcttcatctaccgggcttggacgcagcttacggatttcatcggtatgccaactctgggcgatcaactggcgcaggcgacgcatcagctggttgtgttcgtagtcagcgatatctttgttatcgagctgttttaaacaggcgttcacttccaccattttgtggatcagtgtacgacgggtaatttcggttgggtgagccgtgaggaccagttccaggctcaggctttccactgcttttttgatggtgtcttcgctcagttccggctggtttttcagtttacgcagggtgcgggcgatcacttccgggttgctggcagcttcgcctttcgggctaatgctgtggtattgctcggcggtgttggccaggttcaggaactgactaaacgcacgcgcaacgggcagcagctcgtcgttgctcaaattttgtaaggtggtgagcaactcctggcggttagcatcattgccagcgcgactagatttgctcaacttacggatagtttctacgcgttcaagaatgtgttctcccaacgcatccttgatggtttctcccagcactttgccgagcatactgacattactacgcaatgcggaatattgttcgttcatattaccccagacaccccatcttatcgtttgatagccctgtatccttcacgtcgcattggcgcgaatatgctcgggctttgcttttcgtcgtcttttataaagccacgtaaaagcggtgacgtcaaatgctgcgaaatcgcttcagcaaacgaataaatagcaggaatttacgtcattaaattcacgacgctttaaataagcgtaacttatggaaatgttaaaaaatcgccccaagtaacaccaaaggtgtaggtcggataagatgcgcaagtatcgcatccgacattattgcggcactggagtttggcaacagtgccggatgcggcgcgagcgccttatccggcctacagttgggcatcgtttgagtcactgtcggtcggataagatgcgcaagtatcgcatccgacattattgcggcactggagtttggcaacagtgccggatgcggcgcgagcgccttatccggcctacggttgggcatcgtttgagtcactgtaggtcggataagatgcgcaagcatcgcatccgacattattgcggcactggagtttggcaacagcgccggatgcggcgcgagcgccttatccggcctacgttttaatgccagcaaaaatggtgaattacctgggttatcagttcgcgggtgggcttgataaaccgtgtttccagatattcatcaggttgatgagcctgattaatactgccaggccccaacaccagcgtcgggcataacgtttgaataaacggcgcttcggtacagtagttcaccacttcggtttttgctccgagcaatttctcaaccacttcaaccagttgatgattcggtgggcattcatagccagggatcggcggatgcagctcgtcgaccgtcagacgacccggccagcgttcgctcaccggagccaatgcatcgttgagcaaaccattaagttcattgagtgtcatgccaggcagcggacgaatatccatatgcaactcacagcaagcgcaaatacggttagaagcgtcgccaccgtgaatatgcccgaggttgagcgtagggtatggcacggtaaacgcttcgtagtgataacgttctttcaggttatcgcgcaattgcaaaatatgcccgatggcgtcgtgcattagttcgatagcgttaactccgcgtgctggatcgctggagtgcccgctctggccctgaatacggatggcgttagagatatgacctttatgtgcgcgtaccggttgtagactcgtcggttcgccaatgatggcgcaatccgggcgcagggcggtagtttcggcaaaataacgcgctccggccatactggtttcttcatcagcagtcgccagaatgtagagcggttttttcagtttcgtgacgtcgacatcgcgtagcgcatcaaggataaacgcaaaaaagcctttcatgtcggcggtgcctaagccgtaaagcttgccgtcatgctccgtcagtgtaaacggatcgcgcgtccagcgaccgtcatcaaatggcaccgtatcggtatgccccgccagcaacaagccgccagccccctgtccgatacttgccagcatattgaatttgttgcgagttcctggaacaggctgcacttccacattgaagcccaaatctttaaaccagtccgccagcagagtgattaaatctgcattgctttgatcgagtgcctcttccgtggcgcttatactaggtgtggcaatcagagcgcggtaaatctcgataaatggcggtaatttgtttttcattgttgacacacctctggtcatgatagtatcaatattcatgcagtatttatgaataaaaatacactaacgttgagcgtaataaaacccaccagccgtaaggtgaatgttttacgtttaacctggcaaccagacataagaaggtgaatagccccgatgttgaatacgctgattgtgggtgccagcggctacgctggcgcagagctagtgacctatgtaaatcgccatccgcatatgaacataaccgctttgactgttagtgcgcaaagcaatgatgcgggaaagttaatctccgatttgcatccgcagctaaaaggcatcgttgatctgccgttgcagccgatgagcgatatcagcgagtttagcccaggggtggacgtagtgtttctcgccaccgcccatgaagttagccacgatttagcgccgcagtttcttgaagcgggctgcgtggtgttcgacctttccggcgcgtttcgtgttaacgacgccaccttctatgaaaaatattacggctttacccatcaatacccggaactgttggaacaggcagcctacggtctggcggagtggtgcggtaataaattaaaagaagcgaatttgattgcggtgccgggctgttatccgacggcggcacagctggcgctgaaaccgttgattgatgccgatcttcttgacctcaatcagtggccggtgatcaacgccaccagcggcgtgagcggtgcagggcgtaaagcggccattagtaacagcttttgtgaagttagcctgcaaccgtatggcgtctttactcatcgccatcaaccagagatcgccacacacctcggtgctgacgttatcttcaccccacatctgggcaatttcccgcgcggcattctcgaaaccattacctgccgcctgaaaagcggtgtgacccaggcgcaagtcgcgcaagtgttacagcaggcgtatgcccataaaccgctggtgcggctgtatgacaaaggcgttccggcgctgaaaaatgtcgttgggctgccattttgcgatatcgggtttgccgttcagggcgagcatctgattattgtggcgaccgaagacaacttactgaaaggcgcggcggcacaagcggtacagtgcgccaatattcgtttcggctatgcggaaacgcagtctcttatttaagggtgcaatgatgaatccattaattatcaaactgggcggcgtactgctggatagtgaagaggcgctggaacgtctgtttagcgcactggtgaattatcgtgagagtcatcagcgtccgctggtgattgtgcacggcggcggttgcgtggtggatgagctgatgaaagggctgaatctgccggtgaaaaagaaaaacggcctgcgggtgacgcctgctgatcagatagacattatcaccggagcactggcgggaacggcaaataaaaccctgttggcatgggcgaagaaacatcagattgcggccgtaggtttgtttctcggtgacggcgacagcgtcaaagtgacccagcttgatgaagagttaggtcatgttggactggcgcagccaggtagccctaagcttatcaactccttgctggagaacggttatctgccggtggtcagctccattggcgtaacagacgaagggcaactgatgaacgtcaatgccgaccaggcggcaacggcgctggcggcaacgctgggcgcggatctgattttgctctccgacgtcagcggcattctcgacggcaaagggcaacgcattgccgaaatgaccgccgcgaaagcagaacaactgattgagcagggcattattactgacggcatgatagtgaaagtgaacgcggcgctggatgcggcccgcacgctgggccgtccggtagatatcgcctcctggcgtcatgcggagcagcttccggcactgtttaacggtatgccgatgggtacgcggattttagcttaagttttgttggccggaggcgcagctttccggcattgaatttcaaaataaggaaacagagttatggcactttggggcgggcgttttacccaggcagcagatcaacggttcaaacaattcaacgacagtctgcgctttgattaccgtctggcggagcaggatattgttggctctgtggcctggtccaaagccctggtcacggtaggcgtgttaaccgcagaagagcaggcgcaactggaagaggcgctgaacgtgttgctggaagatgttcgcgccaggccacaacaaatccttgaaagcgacgccgaagatatccatagctgggtggaaggcaaactgatcgacaaagtgggccagttaggcaaaaagctgcataccgggcgtagccgtaatgatcaggtagcgactgacctgaaactgtggtgcaaagataccgttagcgagttactgacggctaaccggcagctgcaaagcgcgctggtggaaaccgcacaaaacaatcaggacgcggtaatgccaggttacactcacctgcaacgcgcccagccggtgacgttcgcgcactggtgcctggcctatgttgagatgctggcgcgtgatgaaagccgtttgcaggatgcgcttaagcgtctggatgtcagcccgctaggctgtggcgcgctggcgggaacggcctatgaaatcgaccgtgaacagttagcaggctggctgggctttgctagcgcgacccgtaacagtctcgacagcgtttctgaccgtgaccatgtgttggaactgctttctgctgccgctatcggcatggtgcatctgagccgttttgctgaagatctgattttctttaacaccggcgaagcggggtttgtggagctttctgaccgcgtgacttccggtagtagtttaatgccgcagaagaaaaacccggatgcgctggagctgattcgcggtaaatgcggccgggtgcagggggcgttaaccggcatgatgatgacgctgaaaggtttgccgctggcttacaacaaagatatgcaggaagacaaagaaggtctgttcgacgcgctcgatacctggctggactgcctgcatatggcggcgctggtgctggacggcattcaggtgaaacgtccacgttgccaggaagcggctcagcagggttacgccaacgccaccgaactggcggattatctggtggcgaaaggcgtaccgttccgcgaggcgcaccatattgttggtgaagcggtggtggaagccattcgtcagggcaaaccgctggaagatctgccgctcagtgagttgcagaaattcagtcaggtgattgacgaagatgtctatccgattctgagcctgcaaagctgcctcgacaagcgtgcggcaaaaggcggcgtcagtccgcagcaggtggcgcaggcgattgcttttgcgcaggctcggttagggtaagaacatttatatgtataaatttgagcctggcttatcgccgggcttttttatggcaaaaaaaagcggatcctggagatccgcaaaagttcacgttggctttagttattcgagttgagaaactctcgaaacgggcagtgacttcaagggttaaaagaggtgccgctccgtttctgtgagcaattatcagtcagaatgcttgatagggataatcgttcattgctattctacctatcgccatgaactatcgtggcgatggaggatggataatgaatattcgtgatcttgagtacctggtggcattggctgaacaccgccattttcggcgtgcggcagattcctgccacgttagccagccgacgcttagcgggcaaattcgtaagctggaagatgagctgggcgtgatgttgctggagcggaccagccgtaaagtgttgttcacccaggcgggaatgctgctggtggatcaggcgcgtaccgtgctgcgtgaggtgaaagtccttaaagagatggcaagccagcagggcgagacgatgtccggaccgctgcacattggtttgattcccacagttggaccgtacctgctaccgcatattatccctatgctgcaccagacctttccaaagctggaaatgtatctgcatgaagcacagacccaccagttactggcgcaactggacagcggcaaactcgattgcgtgatcctcgcgctggtgaaagagagcgaagcattcattgaagtgccgttgtttgatgagccaatgttgctggctatctatgaagatcacccgtgggcgaaccgcgaatgcgtaccgatggccgatctggcaggggaaaaactgctgatgctggaagatggtcactgtttgcgcgatcaggcaatgggtttctgttttgaagccggggcggatgaagatacacacttccgcgcgaccagcctggaaactctgcgcaacatggtggcggcaggtagcgggatcactttactgccagcgctggctgtgccgccggagcgcaaacgcgatggggttgtttatctgccgtgcattaagccggaaccacgccgcactattggcctggtttatcgtcctggcagtccgctgcgcagccgctatgagcagctggcagaggccatccgcgcaagaatggatggccatttcgataaagttttaaaacaggcggtttaaaccgtttaacgcagctacccgataggcttccgccatcgtcgggtagttaaaggtggtgttgacgaagtactcaatagtgttgccgccacctttctgttccataatcgcctgaccgatatgaataatttcggcagcgcgctcgccaaagcagtgaatacccagaatctcttttgtttcccgatggaacaaaattttcagcgtgcccacgttcatgccgacgatttgtgcgcgtgccagatgtttaaactgggcgcggcccacttcatatggcactttcattgcggtcagctgctgttcggttttgcccacagagctgatttccgggatggtgtaaataccggtagggatatcttcaatcagatgtgcggtggcttcgccttttaccagcgcctgcgcggcaatgcgcccctggtcataggccgcgctcgccaggctcggataaccaatcacgtcgcccaccgcgtaaacgtgtggctgtgcggtctgatacatgctgttgaccttcagctgtccgcggctgtcagtttctagcccaatgttctgtaacgccaggctatcggtattaccggtgcgaccgttggcatagagcaggcagtcagctttcagttttttaccgctcttcagatgcatgatcacaccatcgtcacagccttcgatcttctcgtactcttcgttgtgacgaatcactacgccactgttccagaagtgataggagagagaatcactcatctcttgatcgagaaatgccagcaggcgatcgcgggtgttgatcagatccacttttacatccataccgcggaagatgctcgcatattcacagccgatcactccagcaccatagataagtacatggcgcggttcgtggtgcatgctgagaatactgtcgctgtcgtaaatgcgtggatgggtgaaatcaacatctgttggatgatatggacgagagccgcaggcaataacaaatttttcagcggttagtgtttcaacgctgccgtccgggcaatccagcgccaacgtatgctcgtcaacaaagcgagcgtttccctgcaatatttcacagtgattacgttcgtaaaatccctgacgcatgcgcgtttgttgattaatcacgttatcggcatggttaaggatatcggcaaaagaagagcggagcagtcgggaatggtcgctgtaaagtgggttttgattgaattctataatgcggctgacggcgtgacggagagctttgctcgggatggtgccccagtgggtgcaaccgccgccaacattttgataacgctcgataactgcgacgcgcgcaccttgcttaaccaggcccattgcagcgccttcgccgccggggccggaacctattactatggcatcgtaatcgtaggaatgtggcatggtagggcttacctgttcttatacataaaagcaacagaatggtaacattttatcgcgggtaagccaattgatccccgtcatttatctggctatatcctgagcggcctttgctttgtctgtttcttacttttgccctgacgttttattggatttttatcgacgatactctccgtttaagcggcaggtttccgctgtacgtaaaagaaccggccaaagaattgcagtaaatatgttttattgcgttaccgttcattcacaatactggagcaatccagtatgttcattctctggtatagtgccagcagtacttttggcaaggatagtgacatcgtgatgggcgtaagagcgcaacaaaaagaaaaaacccgccgtagcctggtggaagccgcatttagccaattaagtgctgaacgcagcttcgccagcctgagtttgcgtgaagtggcgcgtgaagcgggcattgctcccacctctttttatcggcatttccgcgacgtagacgaactgggtctgaccatggttgatgagagcggtttaatgctacgccaactcatgcgccaggcgcgtcagcgtatcgccaaaggcgggagtgtgatccgcaccagcgtctccacatttatggagttcatcggtaataatcctaacgccttccggttattattgcgggaacgctccggcacctccgctgcgtttcgtgccgccgttgcgcgtgaaattcagcacttcattgcggaacttgcggactatctggaactcgaaaaccatatgccgcgtgcgtttactgaagcgcaagccgaagcaatggtgacaattgtcttcagtgcgggtgccgaggcgttggacgtcggcgtcgaacaacgtcggcaattagaagagcgactggtactgcaactgcgaatgattagcaaaggggcttattactggtatcgccgtgaacaagagaaaaccgcaattattccgggaaatgtgaaggacgagtaatgaaacaagcaaatcaagatagaggtacgctgctgctggcgttagttgctggcttaagcattaatggtactttcgcagcgctgtttagctccattgtgccattttctgtattcccgattatttccctggtgctgacggtttactgcctgcatcaacgttatcttaatcgcactatgccggtaggcttgccgggtctggcagctgcctgttttattctcggcgtactgctgtacagcacggtagttcgtgcggaatatccggatatcggctctaacttcttcccggcagtactctccgtcattatggtgttctggattggcgcgaagatgcgtaaccgtaagcaggaagttgctgagtaatcggtattatgccggatgctggcgcatccggcatgggttttacttcgcggtcagtaatacgccgcactccatatggtgcgtgtaggggaactgatcaaacagagccagacgttcgaccttgtgcgtctggcttaatgtttccagattcttgcataacgtttccgggttacaggagatgtacaaaatacgcggatacgcctgcaccattttctcggtttcactgtccagaccgctgcgcggagggtcgacaaaaatggtttcgcactgataactctttaagtcgatcccttgcaggcggttaaactcgcgcacaccattcatcgcctgagtaaattcttctgccgccatacgaataatttgtacgttatcaatatggttagctgcgatgttgtattgcgcagcagcaacgctcggcttagcgatttcggtggctaatacccgatcaaaattacgcgccagcgctaaactaaagttaccgttgccgcagtacagctccagtaaatcgcctttactgcctttggttacgtccagcgcccattccagcatctgaatattcatcgccgcgttcggctgggtaaagctgttttctacctgacggtagatcatctctttccctgcgaccggcagacgttcatcgatgtaatcctgatccagctcgattttggttttcgttgcccgaccaatcagatgcacattcagattctgcgcgcgcagtgcatcgcgcagggcctccgcttcctgacgccactcatcatccagcttcttatggtatagcagggaaaccaccgcctgattactcagtgtagtgaggtaatcaatctggaacaacttgtggcgcagaacgggattattacgcacacccgcaatcatcgccgtcatcaactggttgataagttcactggcggcggggaagctatccacgcggatgcggcttttggtttgttgatcgaaaatgatgtgatacaggtcatcgccatcgtgccagatgcggaactccgcgcgcatccggtaatgactgaccgggctgcgaaacacttccggaaccaggtcagaaaacggtgccatcatactttgcaaacgtaccactttttcggctaactgcgcttcatactgttctgttggaaggtgttcgggggtcatgatgtatcctgaaaaattaaagtacgcggcgattgtagggattgctcatcagatgtccagatcttgatgaattcctatttgtgagctacgtctggacagtaacttgttacaacctgtagcatccacttgccggtcctgtgagttaatagggaatccagtgcgaatctggagctgacgcgcagcggtaaggaaaggtgcgatgattgcgttatgcggacactgccattcggtgggaagtcatcatctcttagtatcttagatacccctccaagcccgaagacctgccggccaacgtcgcatctggttctcatcatcgcgtaatattgatgaaacctgcggcatccttcttctattgtggatgctttacaatgattaaaaaagctagcctgctgacggcgtgttccgtcacggcattttccgcttgggcacaggataccagcccggatactctcgtcgttactgctaaccgttttgaacagccgcgcagcactgtgcttgcaccaaccaccgttgtgacccgtcaggatatcgaccgctggcagagcaccagcgtcaatgatgtgctgcgccgtcttccgggcgtcgatatcacccaaaacggcggtagtggtcagctcagttctatttttattcgcggtacaaatgccagtcatgtgttggtgttaattgatggcgtacgcctgaatctggcgggggtgagtggttctgccgaccttagccagttccctattgcgcttgtccagcgtgttgaatatatccgtgggccgcgctccgctgtttatggttccgatgcaataggcggggtggtgaatatcatcacgacgcgcgatgaacccggaacggaaattagtgcagggtggggaagcaatagttatcagaactatgatgtctctacgcagcaacaactgggggataagacacgggtaacgctgttgggcgattatgcccatactcatggttatgatgttgttgcctatggtaataccggaacgcaagcgcagacagataacgatggttttttaagtaaaacgctttatggcgcgctggagcataactttactgatgcctggagcggctttgtgcgcggctatggctatgataaccgtaccaattatgacgcgtattattctcccggtagtccgttgctcgatacccgtaaactctatagccaaagttgggacgccgggctgcgctataacggcgaactgattaaaagtcaactcattaccagctatagccatagcaaagattacaactacgatccccattatggtcgttatgatagcagcgcgacgctcgatgagatgaagcaatacaccgtccagtgggcaaacaatgtcatcgttggtcacggtagtattggtgcgggtgtcgactggcagaaacagactacgacgccgggtacaggttatgttgaggatggatatgatcaacgtaataccggcatctatctgaccgggctgcaacaagtcggcgattttacctttgaaggcgcagcacgcagtgacgataacagtcagtttggtcgtcatggaacctggcaaaccagcgccggttgggaattcatcgaaggttatcgcttcattgcttcctacgggacatcttataaggcaccaaatctggggcaactgtatggcttctacggaaatccgaatctggacccggagaaaagcaaacagtgggaaggcgcgtttgaaggcttaaccgctggggtgaactggcgtatttccggatatcgtaacgatgtcagtgacttgatcgattatgatgatcacaccctgaaatattacaacgaagggaaagcgcggattaagggcgtcgaggcgaccgccaattttgataccggaccactgacgcatactgtgagttatgattatgtcgatgcgcgcaatgcgattaccgacacgccgttgttacgccgtgctaaacagcaggtgaaataccagctcgactggcagttgtatgacttcgactggggtattacttatcagtatttaggcactcgctatgataaggattacagttcttatccttatcaaaccgttaaaatgggcggtgtgagcttgtgggatcttgcggttgcgtatccggtcacctctcacctgacagttcgtggtaaaatagccaacctgttcgacaaagattatgagacagtctatggctaccaaactgcaggacgggaatacaccttgtctggcagctacaccttctgaaccacgtcccaccgtgctggtgtttgactccggcgtcggtgggttgagcgtctatgacgagatccggcatctcttaccggatctccattacatttatgctttcgataacgtcgctttcccgtatggcgaaaaaagcgaagcgtttattgttgagcgagtggtggcaattgtcaccgcggtgcaagaacgttatccccttgcgctggctgtggtcgcttgcaacactgccagtaccgttagtcttcctgcattacgcgaaaagttcgacttcccggttgttggtgtcgtgccggcgattaaacctgctgcacgtctgacggcaaatggcattgtcggattactggcaacccgcggaacagttaaacgttcttatactcatgagctgatcgcgcgtttcgctaatgaatgccagatagaaatgctgggcagcgcagagatggttgagttggctgaagcgaagctacatggcgaagatgtttctctggatgcactaaaacgtatcctacgcccgtggttaagaatgaaagagccgccagataccgttgtattgggttgcacccatttccctctactacaagaagaactgttacaagtgctgccagagggaacccggctggtggattctggcgcagcgattgctcgccgaacggcctggttgttagaacatgaagccccggatgcaaaatctgccgatgcgaatattgccttttgtatggcaatgacgccaggagctgaacaattattgcccgttttacagcgttacggcttcgaaacgctcgaaaaactggcagttttaggctgatttggttgaatgttgcgcggtcagaaaattattttaaatttcctcttgtcaggccggaataactccccataatgcgccaccactgacacggaacaacggcaaacacgccgccgggtcagcggggttctcctgagaactccggcagagaaagcaaaaataaatgcttgactctgtagcgggaaggcgtattatgcacaccccgcgccgctgagaaaaagcgaagcggcactgctctttaacaatttatcagacaatctgtgtgggcactcgaagatacggattcttaacgtcgcaagacgaaaaatgaataccaagtctcaagagtgaacacgtaattcattacgaagtttaattctttgagcgtcaaacttttaaattgaagagtttgatcatggctcagattgaacgctggcggcaggcctaacacatgcaagtcgaacggtaacaggaagaagcttgcttctttgctgacgagtggcggacgggtgagtaatgtctgggaaactgcctgatggagggggataactactggaaacggtagctaataccgcataacgtcgcaagaccaaagagggggaccttcgggcctcttgccatcggatgtgcccagatgggattagctagtaggtggggtaacggctcacctaggcgacgatccctagctggtctgagaggatgaccagccacactggaactgagacacggtccagactcctacgggaggcagcagtggggaatattgcacaatgggcgcaagcctgatgcagccatgccgcgtgtatgaagaaggccttcgggttgtaaagtactttcagcggggaggaagggagtaaagttaatacctttgctcattgacgttacccgcagaagaagcaccggctaactccgtgccagcagccgcggtaatacggagggtgcaagcgttaatcggaattactgggcgtaaagcgcacgcaggcggtttgttaagtcagatgtgaaatccccgggctcaacctgggaactgcatctgatactggcaagcttgagtctcgtagaggggggtagaattccaggtgtagcggtgaaatgcgtagagatctggaggaataccggtggcgaaggcggccccctggacgaagactgacgctcaggtgcgaaagcgtggggagcaaacaggattagataccctggtagtccacgccgtaaacgatgtcgacttggaggttgtgcccttgaggcgtggcttccggagctaacgcgttaagtcgaccgcctggggagtacggccgcaaggttaaaactcaaatgaattgacgggggcccgcacaagcggtggagcatgtggtttaattcgatgcaacgcgaagaaccttacctggtcttgacatccacggaagttttcagagatgagaatgtgccttcgggaaccgtgagacaggtgctgcatggctgtcgtcagctcgtgttgtgaaatgttgggttaagtcccgcaacgagcgcaacccttatcctttgttgccagcggtccggccgggaactcaaaggagactgccagtgataaactggaggaaggtggggatgacgtcaagtcatcatggcccttacgaccagggctacacacgtgctacaatggcgcatacaaagagaagcgacctcgcgagagcaagcggacctcataaagtgcgtcgtagtccggattggagtctgcaactcgactccatgaagtcggaatcgctagtaatcgtggatcagaatgccacggtgaatacgttcccgggccttgtacacaccgcccgtcacaccatgggagtgggttgcaaaagaagtaggtagcttaaccttcgggagggcgcttaccactttgtgattcatgactggggtgaagtcgtaacaaggtaaccgtaggggaacctgcggttggatcacctccttaccttaaagaagcgtactttgtagtgctcacacagattgtctgatagaaagtgaaaagcaaggcgtttacgcgttgggagtgaggctgaagagaataaggccgttcgctttctattaatgaaagctcaccctacacgaaaatatcacgcaacgcgtgataagcaattttcgtgtccccttcgtctagaggcccaggacaccgccctttcacggcggtaacaggggttcgaatcccctaggggacgccacttgctggtttgtgagtgaaagtcgccgaccttaatatctcaaaactcatcttcgggtgatgtttgagatatttgctctttaaaaatctggatcaagctgaaaattgaaacactgaacaacgagagttgttcgtgagtctctcaaattttcgcaacacgatgatgaatcgaaagaaacatcttcgggttgtgaggttaagcgactaagcgtacacggtggatgccctggcagtcagaggcgatgaaggacgtgctaatctgcgataagcgtcggtaaggtgatatgaaccgttataaccggcgatttccgaatggggaaacccagtgtgtttcgacacactatcattaactgaatccataggttaatgaggcgaaccgggggaactgaaacatctaagtaccccgaggaaaagaaatcaaccgagattcccccagtagcggcgagcgaacggggagcagcccagagcctgaatcagtgtgtgtgttagtggaagcgtctggaaaggcgcgcgatacagggtgacagccccgtacacaaaaatgcacatgctgtgagctcgatgagtagggcgggacacgtggtatcctgtctgaatatggggggaccatcctccaaggctaaatactcctgactgaccgatagtgaaccagtaccgtgagggaaaggcgaaaagaaccccggcgaggggagtgaaaaagaacctgaaaccgtgtacgtacaagcagtgggagcacgcttaggcgtgtgactgcgtaccttttgtataatgggtcagcgacttatattctgtagcaaggttaaccgaataggggagccgaagggaaaccgagtcttaactgggcgttaagttgcagggtatagacccgaaacccggtgatctagccatgggcaggttgaaggttgggtaacactaactggaggaccgaaccgactaatgttgaaaaattagcggatgacttgtggctgggggtgaaaggccaatcaaaccgggagatagctggttctccccgaaagctatttaggtagcgcctcgtgaattcatctccgggggtagagcactgtttcggcaagggggtcatcccgacttaccaacccgatgcaaactgcgaataccggagaatgttatcacgggagacacacggcgggtgctaacgtccgtcgtgaagagggaaacaacccagaccgccagctaaggtcccaaagtcatggttaagtgggaaacgatgtgggaaggcccagacagccaggatgttggcttagaagcagccatcatttaaagaaagcgtaatagctcactggtcgagtcggcctgcgcggaagatgtaacggggctaaaccatgcaccgaagctgcggcagcgacgcttatgcgttgttgggtaggggagcgttctgtaagcctgcgaaggtgtgctgtgaggcatgctggaggtatcagaagtgcgaatgctgacataagtaacgataaagcgggtgaaaagcccgctcgccggaagaccaagggttcctgtccaacgttaatcggggcagggtgagtcgacccctaaggcgaggccgaaaggcgtagtcgatgggaaacaggttaatattcctgtacttggtgttactgcgaaggggggacggagaaggctatgttggccgggcgacggttgtcccggtttaagcgtgtaggctggttttccaggcaaatccggaaaatcaaggctgaggcgtgatgacgaggcactacggtgctgaagcaacaaatgccctgcttccaggaaaagcctctaagcatcaggtaacatcaaatcgtaccccaaaccgacacaggtggtcaggtagagaataccaaggcgcttgagagaactcgggtgaaggaactaggcaaaatggtgccgtaacttcgggagaaggcacgctgatatgtaggtgaggtccctcgcggatggagctgaaatcagtcgaagataccagctggctgcaactgtttattaaaaacacagcactgtgcaaacacgaaagtggacgtatacggtgtgacgcctgcccggtgccggaaggttaattgatggggttagcgcaagcgaagctcttgatcgaagccccggtaaacggcggccgtaactataacggtcctaaggtagcgaaattccttgtcgggtaagttccgacctgcacgaatggcgtaatgatggccaggctgtctccacccgagactcagtgaaattgaactcgctgtgaagatgcagtgtacccgcggcaagacggaaagaccccgtgaacctttactatagcttgacactgaacattgagccttgatgtgtaggataggtgggaggctttgaagtgtggacgccagtctgcatggagccgaccttgaaataccaccctttaatgtttgatgttctaacgttgacccgtaatccgggttgcggacagtgtctggtgggtagtttgactggggcggtctcctcctaaagagtaacggaggagcacgaaggttggctaatcctggtcggacatcaggaggttagtgcaatggcataagccagcttgactgcgagcgtgacggcgcgagcaggtgcgaaagcaggtcatagtgatccggtggttctgaatggaagggccatcgctcaacggataaaaggtactccggggataacaggctgataccgcccaagagttcatatcgacggcggtgtttggcacctcgatgtcggctcatcacatcctggggctgaagtaggtcccaagggtatggctgttcgccatttaaagtggtacgcgagctgggtttagaacgtcgtgagacagttcggtccctatctgccgtgggcgctggagaactgaggggggctgctcctagtacgagaggaccggagtggacgcatcactggtgttcgggttgtcatgccaatggcactgcccggtagctaaatgcggaagagataagtgctgaaagcatctaagcacgaaacttgccccgagatgagttctccctgaccctttaagggtcctgaaggaacgttgaagacgacgacgttgataggccgggtgtgtaagcgcagcgatgcgttgagctaaccggtactaatgaaccgtgaggcttaaccttacaacgccgaagctgttttggcggatgagagaagattttcagcctgatacagattaaatcagaacgcagaagcggtctgataaaacagaatttgcctggcggcagtagcgcggtggtcccacctgaccccatgccgaactcagaagtgaaacgccgtagcgccgatggtagtgtggggtctccccatgcgagagtagggaactgccaggcatcaaataaaacgaaaggctcagtcgaaagactgggcctttcgttttatctgttgtttgtcggtgaacgctctcctgagtaggacaaatccgccgggagcggatttgaacgttgcgaagcaacggcccggagggtggcgggcaggacgcccgccataaactgccaggcatcaaattaagcagaaggccatcctgacggatggcctttttgcgtttctacaaactcttcctgtcgtcatatctacaagccatccccccacagatacggtaaactagcctcgtttttgcatcaggaaagcagctatgaaccactccttaaaaccctggaacacatttggcattgatcataatgctcagcacattgtatgtgccgaagacgaacaacaattactcaatgcctggcagtatgcaaccgcagaaggacaacccgttcttattctgggtgaaggaagtaatgtactttttctggaggactatcgcggcacggtgatcatcaaccggatcaaaggtatcgaaattcatgatgaacctgatgcgtggtatttacatgtaggagccggagaaaactggcatcgtctggtaaaatacactttgcaggaaggtatgcctggtctggaaaatctggcattaattcctggttgtgtcggcagtagtcctatccagaatattggtgcttatggcgtagaattacagcgagtttgcgcttatgttgattctgttgaactggcgacaggcaagcaagtgcgcttaactgccaaagagtgccgttttggctatcgcgacagtatttttaaacatgaataccaggaccgcttcgctattgtagccgtaggtctgcgtctgccaaaagagtggcaacctgtactaacgtatggtgacttaactcgtctggatcctacaacagtaacgccacagcaagtatttaatgcggtgtgtcatatgcgcaccaccaaactccctgatccaaaagtgaatggcaatgccggtagtttcttcaaaaaccctgttgtatctgccgaaacggctaaagcattactgagtcaatttccaacagcaccaaattacccccaggcggatggtagtgtaaaactggcagcaggttggcttatcgatcagtgccagctaaaagggatgcaaataggtggggctgcggtgcaccgtcaacaggcgttagttctcattaatgaagacaatgcaaaaagcgaagatgttgtacagctggcgcatcatgtaagacagaaagttggtgaaaaatttaatgtctggcttgagcctgaagtccgctttattggtgcaagtggtgaagtgagcgcagtggagacaattagttgaaataaagcgcagtggagacaatttcatgaaggataacaccgtgccactgaaattgattgccctgttagcgaacggtgaatttcactctggcgagcagttgggtgaaacgctgggaatgagccgggcggctattaataaacacattcagacactgcgtgactggggcgttgatgtctttaccgttccgggtaaaggatacagcctgcctgagcctatccagttacttaatgctaaacagatattgggtcagctggatggcggtagtgtagccgtgctgccagtgattgactccacgaatcagtaccttcttgatcgtatcggagagcttaaaagcggcgatgcttgcattgcagaataccagcaggctggccgtggtcgccggggtcggaaatggtttagcccttttggcgcaaacttatatttgagcatgttctggcgtctggaacaaggcccggcggcggcgattggtttaagtctggttatcggtatcgtgatggcggaagtattacgcaagctgggtgcagataaagttcgtgttaaatggcctaatgacctctatctgcaggatcgcaagctggcaggcattctggtggagctgactggcaaaactggcgatgcggcgcaaatagtcattggagccgggatcaacatggcaatgcgccgtgttgaagagagtgtcgttaatcaggggtggatcacgctgcaggaagcggggatcaatctcgatcgtaatacgttggcggccatgctaatacgtgaattacgtgctgcgttggaactcttcgaacaagaaggattggcaccttatctgagccgctgggaaaagctggataattttattaatcgcccagtgaaacttatcattggtgataaagaaatatttggcattagtcgcggaatagacaaacagggggctttattacttgagcaggatggaataataaaaccctggatgggcggtgaaatatccctgcgtagtgcagaaaaataagaaaggggagtattcgctcccctgcaaattatttgcgtagtctgacctcttctaccgcatgattagcacttttcgtcaggattaaactggcgcgctcacgagtaggtagaatattttgctttaagttcagccagttgatctctttccacaatgtcatggcagtcttaatcgcttcttctttagttaatttcgcgtagttatgaaaataggaatccgggtcggtaaaagccccttcgcggaatttcagaaaacggttgatataccatgtctgaagtaagtcttccggtgcatcaacatatatgctaaaatcgacaaaatcagaaacaaatacatgatgtggatcgtgtggataatccatcccgctctgtaagacatttaacccttcaagaattaaaatatcaggctgaacaaccgttttatctccatccgggatcacatcataaataagatgactgtaaacaggtgctgtaacgtttggcacgccggatttgagatcggaaacaaacttcaccaggcgatgcatatcatagctttccgggaagcctttcttcttcatcagaccacgttctttcagaacctgattagggtgaaggaagccatctgtagtgatcagttcaacacgacgatgttccggccaacggcttaatagcgcctgcaatacacgggcggttgtacttttccccaccgcgacactgccagcaatactgataatgtaaggaatgcgttgcccgttggtaccaagaaactgttccagaactgcctgacggcgcagattgctgcttatatagaagttcagcaaacgactcaaaggtaaatagatctcggcaacttcttctaagctgagatcttcattaatacctttgagacgggcgatctcatcttcgcttaacgtcataggtacggaatcacgcagagctgcccactggttgcggtcaaactgtaggtaaggcgtcattaacgtttgctcttttatactcataagcatgtttctggcggtcatagctctatcggcaaagcgatatttgccatggcgcgtcacagttctgttgaatgggttaatgggcaggagggtaacaccagatggggaggaataataagaaaaaatctctgccaggaagctatcgttgaaaagcaatgtgacagatattccatctgataaaaagaattatggtttagcaggagcgcattgttgagcacaatgatgttgaaaaagtgtgctaatctgccctccgttcggctgtttcttcatcgtgtcgcataaaatgtgaccaataaaacaaattatgcaattttttagttgcatgaactcgcatgtctccatagaatgcgcgctacttgatgccgacttagctcagtaggtagagcaactgacttgtaatcagtaggtcaccagttcgattccggtagtcggcaccatcaagtccggtggggttcccgagcggccaaagggagcagactgtaaatctgccgtcacagacttcgaaggttcgaatccttcccccaccaccaatttcggccacgcgatggcgtagcccgagacgataagttcgcttaccggctcgaataaagagagcttctctcgatattcagtgcagaatgaaaatcaggtagccgagttccaggatgcgggcatcgtataatggctattacctcagccttccaagctgatgatgcgggttcgattcccgctgcccgctccaagatgtgctgatatagctcagttggtagagcgcacccttggtaagggtgaggtcggcagttcgaatctgcctatcagcaccacttcttttctcctccctgttttttccttctgtttattgcattcaacaagtcgggcatgttgcctggttgatgtggtgatatcaccgatttatccgtgtcttagagggacaatcgatgtctaaagaaaagtttgaacgtacaaaaccgcacgttaacgtcggtactatcggccacgttgaccatggtaaaacaacgctgaccgctgcaatcactaccgtactggctaaaacctacggcggtgctgctcgcgcattcgaccagatcgataacgcgccggaagaaaaagctcgtggtatcaccatcaacacttctcacgttgaatacgacaccccgacccgccactacgcacacgtagactgcccggggcacgccgactatgttaaaaacatgatcaccggtgctgcgcagatggacggcgcgatcctggtagttgctgcgactgacggcccgatgccgcagactcgtgagcacatcctgctgggtcgtcaggtaggcgttccgtacatcatcgtgttcctgaacaaatgcgacatggttgatgacgaagagctgctggaactggttgaaatggaagttcgtgaacttctgtctcagtacgacttcccgggcgacgacactccgatcgttcgtggttctgctctgaaagcgctggaaggcgacgcagagtgggaagcgaaaatcctggaactggctggcttcctggattcttacattccggaaccagagcgtgcgattgacaagccgttcctgctgccgatcgaagacgtattctccatctccggtcgtggtaccgttgttaccggtcgtgtagaacgcggtatcatcaaagttggtgaagaagttgaaatcgttggtatcaaagagactcagaagtctacctgtactggcgttgaaatgttccgcaaactgctggacgaaggccgtgctggtgagaacgtaggtgttctgctgcgtggtatcaaacgtgaagaaatcgaacgtggtcaggtactggctaagccgggcaccatcaagccgcacaccaagttcgaatctgaagtgtacattctgtccaaagatgaaggcggccgtcatactccgttcttcaaaggctaccgtccgcagttctacttccgtactactgacgtgactggtaccatcgaactgccggaaggcgtagagatggtaatgccgggcgacaacatcaaaatggttgttaccctgatccacccgatcgcgatggacgacggtctgcgtttcgcaatccgtgaaggcggccgtaccgttggcgcgggcgttgtagcaaaagttctgagctaattgccgataacatttgacgcaatgcgcactaaaagggcatcatttgatgccctttttgcacgctttcgtaccagaacctggctcatcagtgattttctttgtcataatcattgctgagacaggctctgttgagggcgtataatccgaaaagctaatacgcgtttcgatttggtttgcctcgcgatcgcggggtgaaaatgtttgtagaaaacttctgacaggttggtttatgagtgcgaataccgaagctcaaggaagcgggcgcggcctggaagcgatgaagtgggtcgttgtggtggcattgctcctggtggcgattgtcggcaactatctttatcgcgacattatgctgccgctgcgtgcgctggccgtagtaattctgattgctgcagcgggtggtgtcgcgctgttaacgacaaaaggtaaagctaccgttgcttttgcccgtgaagcgcgtaccgaagtccgtaaggtcatttggccgactcgccaggaaacattgcacaccacgctgattgtggctgcggttaccgcagtaatgagtctgatcctgtggggactggatggtattctggttcgcctggtatcctttatcactggcctgaggttctgagatgtctgaagctcctaaaaagcgctggtacgtcgttcaggcgttttccggttttgaaggccgcgtagcaacgagcctgcgtgagcatatcaaattacacaacatggaagatttgtttggtgaagtcatggtaccaaccgaagaagtggttgaaatccgtggcggtcagcgtcgcaaaagcgaacgtaaattcttccctggctacgtcctcgttcagatggtgatgaacgacgcgagctggcacctggtgcgcagcgtaccgcgtgtgatgggcttcatcggcggtacttccgatcgtcctgcgccaatcagcgataaagaagtcgatgcgattatgaaccgcctgcagcaggttggtgataagccgcgtccgaaaacgctgtttgaaccgggtgaaatggtccgtgttaatgatggtccgttcgctgacttcaacggtgttgttgaagaagtggattacgagaaatctcgtctgaaagtgtctgtttctatcttcggtcgtgcgaccccggtagagctggacttcagccaggttgaaaaagcctaacccagcgatcaaaaaagcggcgatttaatcgttgcacaaggcgtgagattggaatacaatttcgcgccttttgtttttatgggccttgcccgtaaaacgattttttatatcacggggagcctctcagaggcgttattacccaacttgaggaatttataatggctaagaaagtacaagcctatgtcaagctgcaggttgcagctggtatggctaacccgagtccgccagtaggtccggctctgggtcagcagggcgtaaacatcatggaattctgcaaagcgttcaacgcaaaaactgattccatcgaaaaaggtctgccgattccggtagtaatcaccgtttacgctgaccgttctttcactttcgttaccaagaccccgccggcagcagttctgctgaaaaaagcggctggtatcaagtctggttccggtaagccgaacaaagacaaagtgggtaaaatttcccgcgctcagctgcaggaaatcgcgcagaccaaagctgccgacatgactggtgccgacattgaagcgatgactcgctccatcgaaggtactgcacgttccatgggcctggtagtggaggactaagaaatggctaaactgaccaagcgcatgcgtgttatccgcgagaaagttgatgcaaccaaacagtacgacatcaacgaagctatcgcactgctgaaagagctggcgactgctaaattcgtagaaagcgtggacgtagctgttaacctcggcatcgacgctcgtaaatctgaccagaacgtacgtggtgcaactgtactgccgcacggtactggccgttccgttcgcgtagccgtatttacccaaggtgcaaacgctgaagctgctaaagctgcaggcgcagaactggtaggtatggaagatctggctgaccagatcaagaaaggcgaaatgaactttgacgttgttattgcttctccggatgcaatgcgcgttgttggccagctgggccaggttctgggtccgcgcggcctgatgccaaacccgaaagtgggtactgtaacaccgaacgttgctgaagcggttaaaaacgctaaagctggccaggttcgttaccgtaacgacaaaaacggcatcatccacaccaccatcggtaaagtggactttgacgctgacaaactgaaagaaaacctggaagctctgctggttgcgctgaaaaaagcaaaaccgactcaggcgaaaggcgtgtacatcaagaaagttagcatctccaccaccatgggtgcaggtgttgcagttgaccaggctggcctgagcgcttctgtaaactaatgcctttacgtgggcggtgattttgtctacaatcttacccccacgtataatgcttaatgcagacgtatatccgagatattcgggttgtggcaaggcggcaactgagtgagtcgccaggagcatagctaactatgtgactggtgcgaatgaaggaagccaacgccgtcacaagctgaatagcgacggatagaaaagatttgttcgttggagcctggcctatccaggcctccgtcgaagaccgcaggagtttcgcaagaaacttaatcccctgcgtagacggtgacagaacgctaagattattcttttatattctggcttgtttctgctcaccgtaattaagacgctctctccgtttggaggagtgaagtgagttccagagattttctctggcaaacatccaggagcaaagctaatggctttaaatcttcaagacaaacaagcgattgttgctgaagtcagcgaagtagccaaaggcgcgctgtctgcagtagttgcggattcccgtggcgtaactgtagataaaatgactgaactgcgtaaagcaggtcgcgaagctggcgtatacatgcgtgttgttcgtaacaccctgctgcgccgtgctgttgaaggtactccgttcgagtgcctgaaagacgcgtttgttggtccgaccctgattgcatactctatggaacacccgggcgctgctgctcgtctgttcaaagagttcgcgaaagcgaatgcaaaatttgaggtcaaagccgctgcctttgaaggtgagctgatcccggcgtctcagatcgaccgcctggcaactctgccgacctacgaagaagcaattgcacgcctgatggcaaccatgaaagaagctagcgctggcaaactggttcgtactctggctgctgtacgcgatgcgaaagaagctgcttaatcgcagttatctttttaacgcattcgcttacgtataaacttattctgatattcaggaacaatttaaatgtctatcactaaagatcaaatcattgaagcagttgcagctatgtctgtaatggacgttgtagaactgatctctgcaatggaagaaaaattcggtgtttccgctgctgctgctgtagctgtagctgctggcccggttgaagctgctgaagaaaaaactgaattcgacgtaattctgaaagctgctggcgctaacaaagttgctgttatcaaagcagtacgtggcgcaactggcctgggtctgaaagaagctaaagacctggtagaatctgcaccggctgctctgaaagaaggcgtgagcaaagacgacgcagaagcactgaaaaaagctctggaagaagctggcgctgaagttgaagttaaataagccaacccttccggttgcagcctgagaaatcaggctgatggctggtgactttttagtcaccagcctttttgcgctgtaaggcgccagtagcgtttcacactgtttgactactgctgtgcctttcaatgcttgtttctatcgacgacttaatatactgcgacaggacgtccgttctgtgtaaatcgcaatgaaatggtttaagcgtgatagcaacaggcattgcggaaagtgttccattttccggtcaacaaaatagtgttgcacaaactgtccgctcaatggacagatgggtcgacttgtcagcgagctgaggaaccctatggtttactcctataccgagaaaaaacgtattcgtaaggattttggtaaacgtccacaagttctggatgtaccttatctcctttctatccagcttgacagctttcagaaatttatcgagcaagatcctgaagggcagtatggtctggaagctgctttccgttccgtattcccgattcagagctacagcggtaattccgagctgcaatacgtcagctaccgccttggcgaaccggtgtttgacgtccaggaatgtcaaatccgtggcgtgacctattccgcaccgctgcgcgttaaactgcgtctggtgatctatgagcgcgaagcgccggaaggcaccgtaaaagacattaaagaacaagaagtctacatgggcgaaattccgctcatgacagacaacggtacctttgttatcaacggtactgagcgtgttatcgtttcccagctgcaccgtagtccgggcgtcttctttgactccgacaaaggtaaaacccactctagcggtaaagtgctgtataacgcgcgtatcatcccttaccgtggttcctggctggacttcgaattcgatccgaaggacaacctgttcgtacgtatcgaccgtcgccgtaaactgcctgcgaccatcattctgcgcgccctgaactacaccacagagcagatcctcgacctgttctttgaaaaagttatctttgaaatccgtgataacaagctgcagatggaactggtgccggaacgcctgcgtggtgaaaccgcatcttttgacatcgaagctaacggtaaagtgtacgtagaaaaaggccgccgtatcactgcgcgccacattcgccagctggaaaaagacgacgtcaaactgatcgaagtcccggttgagtacatcgcaggtaaagtggttgctaaagactatattgatgagtctaccggcgagctgatctgcgcagcgaacatggagctgagcctggatctgctggctaagctgagccagtctggtcacaagcgtatcgaaacgctgttcaccaacgatctggatcacggcccatatatctctgaaaccttacgtgtcgacccaactaacgaccgtctgagcgcactggtagaaatctaccgcatgatgcgccctggcgagccgccgactcgtgaagcagctgaaagcctgttcgagaacctgttcttctccgaagaccgttatgacttgtctgcggttggtcgtatgaagttcaaccgttctctgctgcgcgaagaaatcgaaggttccggtatcctgagcaaagacgacatcattgatgttatgaaaaagctcatcgatatccgtaacggtaaaggcgaagtcgatgatatcgaccacctcggcaaccgtcgtatccgttccgttggcgaaatggcggaaaaccagttccgcgttggcctggtacgtgtagagcgtgcggtgaaagagcgtctgtctctgggcgatctggataccctgatgccacaggatatgatcaacgccaagccgatttccgcagcagtgaaagagttcttcggttccagccagctgtctcagtttatggaccagaacaacccgctgtctgagattacgcacaaacgtcgtatctccgcactcggcccaggcggtctgacccgtgaacgtgcaggcttcgaagttcgagacgtacacccgactcactacggtcgcgtatgtccaatcgaaacccctgaaggtccgaacatcggtctgatcaactctctgtccgtgtacgcacagactaacgaatacggcttccttgagactccgtatcgtaaagtgaccgacggtgttgtaactgacgaaattcactacctgtctgctatcgaagaaggcaactacgttatcgcccaggcgaactccaacttggatgaagaaggccacttcgtagaagacctggtaacttgccgtagcaaaggcgaatccagcttgttcagccgcgaccaggttgactacatggacgtatccacccagcaggtggtatccgtcggtgcgtccctgatcccgttcctggaacacgatgacgccaaccgtgcattgatgggtgcgaacatgcaacgtcaggccgttccgactctgcgcgctgataagccgctggttggtactggtatggaacgtgctgttgccgttgactccggtgtaactgcggtagctaaacgtggtggtgtcgttcagtacgtggatgcttcccgtatcgttatcaaagttaacgaagacgagatgtatccgggtgaagcaggtatcgacatctacaacctgaccaaatacacccgttctaaccagaacacctgtatcaaccagatgccgtgtgtgtctctgggtgaaccggttgaacgtggcgacgtgctggcagacggtccgtccaccgacctcggtgaactggcgcttggtcagaacatgcgcgtagcgttcatgccgtggaatggttacaacttcgaagactccatcctcgtatccgagcgtgttgttcaggaagaccgtttcaccaccatccacattcaggaactggcgtgtgtgtcccgtgacaccaagctgggtccggaagagatcaccgctgacatcccgaacgtgggtgaagctgcgctctccaaactggatgaatccggtatcgtttacattggtgcggaagtgaccggtggcgacattctggttggtaaggtaacgccgaaaggtgaaactcagctgaccccagaagaaaaactgctgcgtgcgatcttcggtgagaaagcctctgacgttaaagactcttctctgcgcgtaccaaacggtgtatccggtacggttatcgacgttcaggtctttactcgcgatggcgtagaaaaagacaaacgtgcgctggaaatcgaagaaatgcagctcaaacaggcgaagaaagacctgtctgaagaactgcagatcctcgaagcgggtctgttcagccgtatccgtgctgtgctggtagccggtggcgttgaagctgagaagctcgacaaactgccgcgcgatcgctggctggagctgggcctgacagacgaagagaaacaaaatcagctggaacagctggctgagcagtatgacgaactgaaacacgagttcgagaagaaactcgaagcgaaacgccgcaaaatcacccagggcgacgatctggcaccgggcgtgctgaagattgttaaggtatatctggcggttaaacgccgtatccagcctggtgacaagatggcaggtcgtcacggtaacaagggtgtaatttctaagatcaacccgatcgaagatatgccttacgatgaaaacggtacgccggtagacatcgtactgaacccgctgggcgtaccgtctcgtatgaacatcggtcagatcctcgaaacccacctgggtatggctgcgaaaggtatcggcgacaagatcaacgccatgctgaaacagcagcaagaagtcgcgaaactgcgcgaattcatccagcgtgcgtacgatctgggcgctgacgttcgtcagaaagttgacctgagtaccttcagcgatgaagaagttatgcgtctggctgaaaacctgcgcaaaggtatgccaatcgcaacgccggtgttcgacggtgcgaaagaagcagaaattaaagagctgctgaaacttggcgacctgccgacttccggtcagatccgcctgtacgatggtcgcactggtgaacagttcgagcgtccggtaaccgttggttacatgtacatgctgaaactgaaccacctggtcgacgacaagatgcacgcgcgttccaccggttcttacagcctggttactcagcagccgctgggtggtaaggcacagttcggtggtcagcgtttcggggagatggaagtgtgggcgctggaagcatacggcgcagcatacaccctgcaggaaatgctcaccgttaagtctgatgacgtgaacggtcgtaccaagatgtataaaaacatcgtggacggcaaccatcagatggagccgggcatgccagaatccttcaacgtattgttgaaagagattcgtagcctgggtatcaacatcgaactggaagacgagtaattctcgctcaaacaggtcactgctgtcgggttaaaacccggcagcggattgtgctaactccgacgggagcaaatccgtgaaagatttattaaagtttctgaaagcgcagactaaaaccgaagagtttgatgcgatcaaaattgctctggctagcccagacatgatccgtagttggtctttcggtgaagttaaaaagccggaaaccatcaactaccgtacgttcaaaccagaacgtgacggccttttctgcgcccgtatctttgggccggtaaaagattacgagtgcctgtgcggtaagtacaagcgcctgaaacaccgtggcgtcatctgtgagaagtgcggcgttgaagtgacccagactaaagtacgccgtgagcgtatgggccacatcgaactggcttccccgactgcgcacatctggttcctgaaaagcctgccgtcccgtatcggtctgctgctcgatatgccgctgcgcgatatcgaacgcgtactgtactttgaatcctatgtggttatcgaaggcggtatgaccaacctggaacgtcagcagatcctgactgaagagcagtatctggacgcgctggaagagttcggtgacgaattcgacgcgaagatgggggcggaagcaatccaggctctgctgaagagcatggatctggagcaagagtgcgaacagctgcgtgaagagctgaacgaaaccaactccgaaaccaagcgtaaaaagctgaccaagcgtatcaaactgctggaagcgttcgttcagtctggtaacaaaccagagtggatgatcctgaccgttctgccggtactgccgccagatctgcgtccgctggttccgctggatggtggtcgtttcgcgacttctgacctgaacgatctgtatcgtcgcgtcattaaccgtaacaaccgtctgaaacgtctgctggatctggctgcgccggacatcatcgtacgtaacgaaaaacgtatgctgcaggaagcggtagacgccctgctggataacggtcgtcgcggtcgtgcgatcaccggttctaacaagcgtcctctgaaatctttggccgacatgatcaaaggtaaacagggtcgtttccgtcagaacctgctcggtaagcgtgttgactactccggtcgttctgtaatcaccgtaggtccatacctgcgtctgcatcagtgcggtctgccgaagaaaatggcactggagctgttcaaaccgttcatctacggcaagctggaactgcgtggtcttgctaccaccattaaagctgcgaagaaaatggttgagcgcgaagaagctgtcgtttgggatatcctggacgaagttatccgcgaacacccggtactgctgaaccgtgcaccgactctgcaccgtctgggtatccaggcatttgaaccggtactgatcgaaggtaaagctatccagctgcacccgctggtttgtgcggcatataacgccgacttcgatggtgaccagatggctgttcacgtaccgctgacgctggaagcccagctggaagcgcgtgcgctgatgatgtctaccaacaacatcctgtccccggcgaacggcgaaccaatcatcgttccgtctcaggacgttgtactgggtctgtactacatgacccgtgactgtgttaacgccaaaggcgaaggcatggtgctgactggcccgaaagaagcagaacgtctgtatcgctctggtctggcttctctgcatgcgcgcgttaaagtgcgtatcaccgagtatgaaaaagatgctaacggtgaattagtagcgaaaaccagcctgaaagacacgactgttggccgtgccattctgtggatgattgtaccgaaaggtctgccttactccatcgtcaaccaggcgctgggtaaaaaagcaatctccaaaatgctgaacacctgctaccgcattctcggtctgaaaccgaccgttatttttgcggaccagatcatgtacaccggcttcgcctatgcagcgcgttctggtgcatctgttggtatcgatgacatggtcatcccggagaagaaacacgaaatcatctccgaggcagaagcagaagttgctgaaattcaggagcagttccagtctggtctggtaactgcgggcgaacgctacaacaaagttatcgatatctgggctgcggcgaacgatcgtgtatccaaagcgatgatggataacctgcaaactgaaaccgtgattaaccgtgacggtcaggaagagaagcaggtttccttcaacagcatctacatgatggccgactccggtgcgcgtggttctgcggcacagattcgtcagcttgctggtatgcgtggtctgatggcgaagccggatggctccatcatcgaaacgccaatcaccgcgaacttccgtgaaggtctgaacgtactccagtacttcatctccacccacggtgctcgtaaaggtctggcggataccgcactgaaaactgcgaactccggttacctgactcgtcgtctggttgacgtggcgcaggacctggtggttaccgaagacgattgtggtacccatgaaggtatcatgatgactccggttatcgagggtggtgacgttaaagagccgctgcgcgatcgcgtactgggtcgtgtaactgctgaagacgttctgaagccgggtactgctgatatcctcgttccgcgcaacacgctgctgcacgaacagtggtgtgacctgctggaagagaactctgtcgacgcggttaaagtacgttctgttgtatcttgtgacaccgactttggtgtatgtgcgcactgctacggtcgtgacctggcgcgtggccacatcatcaacaagggtgaagcaatcggtgttatcgcggcacagtccatcggtgaaccgggtacacagctgaccatgcgtacgttccacatcggtggtgcggcatctcgtgcggctgctgaatccagcatccaagtgaaaaacaaaggtagcatcaagctcagcaacgtgaagagcgttgtgaactccagcggtaaactggttatcacttcccgtaatactgaactgaaactgatcgacgaattcggtcgtactaaagaaagctacaaagtaccttacggtgcggtactggcgaaaggcgatggcgaacaggttgctggcggcgaaaccgttgcaaactgggacccgcacaccatgccggttatcaccgaagtaagcggttttgtacgctttactgacatgatcgacggccagaccattacgcgtcagaccgacgaactgaccggtctgtctagcctggtggttctggattccgcagaacgtaccgcaggtggtaaagatctgcgtccggcactgaaaatcgttgatgctcagggtaacgacgttctgatcccaggtaccgatatgccagcgcagtacttcctgccgggtaaagcgattgttcagctggaagatggcgtacagatcagctctggtgacaccctggcgcgtattccgcaggaatccggcggtaccaaggacatcaccggtggtctgccgcgcgttgcggacctgttcgaagcacgtcgtccgaaagagccggcaatcctggctgaaatcagcggtatcgtttccttcggtaaagaaaccaaaggtaaacgtcgtctggttatcaccccggtagacggtagcgatccgtacgaagagatgattccgaaatggcgtcagctcaacgtgttcgaaggtgaacgtgtagaacgtggtgacgtaatttccgacggtccggaagcgccgcacgacattctgcgtctgcgtggtgttcatgctgttactcgttacatcgttaacgaagtacaggacgtataccgtctgcagggcgttaagattaacgataaacacatcgaagttatcgttcgtcagatgctgcgtaaagctaccatcgttaacgcgggtagctccgacttcctggaaggcgaacaggttgaatactctcgcgtcaagatcgcaaaccgcgaactggaagcgaacggcaaagtgggtgcaacttactcccgcgatctgctgggtatcaccaaagcgtctctggcaaccgagtccttcatctccgcggcaagcttccaggagaccactcgcgtgctgaccgaagcagccgttgcgggcaaacgcgacgaactgcgcggcctgaaagagaacgttatcgtgggtcgtctgatcccggcaggtaccggttacgcgtaccaccaggatcgtatgcgtcgccgtgctgcgggtgaagctccggctgcaccgcaggtgactgcagaagacgcatctgccagcctggcagaactgctgaacgcaggtctgggcggttctgataacgagtaatcgttaatccgcaaataacgtaaaaacccgcttcggcgggtttttttatggggggagtttagggaaagagcatttgtcagaatatttaaggaatttctgaatactcataatcaatgtagagatgactaatatcctgaaactgactgaactaattgagtcaaactcggcaaggattcgatactattcctgtgtaactttcttaaggaacgagaatgaaacaggaagtggaaaagtggcgaccttttggacatccggatggtgatattcgtgatttaagttttcttgatgctcatcaggctgtctacgttcagcatcatgagggcaaagagcctttagagtatcgcttttgggttacctactctcttcactgcttcacaaaagattatgaacatcagacgaacgaagaaaaacaaagcttaatgtaccacgcgcctaaagaatctcgtcccttctgccagcaccgttataacttagcgcgcacacacttaaaaagaactattttggcgctgccagaaagcaacgttattcatgccgggtatggtagctatgccgtgattgaggtggacttagacggaggagataaggcattttactttgttgcgttcagggctttcagggaaaagaaaaaactccgtttgcatgtaactagcgcttatcccatttctgaaaaacagaaaggtaaaagtgtgaaatttttcaccattgcctacaacttattgagaaataagcagcttcctcagcccagtaaataacaaaacccaccttaaggtgggtttcgccagagaattatctctggtattcagaacgccattaccggactttgccttgaccttgcgataatcgcaggttgcgggatgtctgaatttcttcagtctgctgcatcctggaagatgagaacatgtgttcttattttcgtctctatcatagttgagtatttactctcttacaatcagatctctttcattgctcaacaggcgatggcttcagactttgcattacggaatttttaagaaaggcagggcgaaacgaggaagaagcttttcgccctggacaacattcctgctgacggcactaccataaaaaaacacaacgctttcaacaaccttgcgtttttcatcttccgtagcggctcggaataaatttacgttcttacattccgtctcatagtctttggctggcgcgtcccagatagctgtcccagtctttccataccggctgcaaaccctgagcggttaacgcggcagcaaccgcttccggtctgcgatcgtcgtgcggactgaactgttccaactcggggtgattatcggcatagccacctggctgcgttttgctgaaggcgctgacgttattgatcgccagcggaataacgcgatcgcgaaaccacggactttcccgcgtggagagactcagttcaatctccggtgcaagcagtcggaaggcgcagatggtttgcactaactggcgttcatccataatgctcgcaggctcaatgccgccagtacacgggcgcaggcgcggaaaggagacagagtaacggctttgccagtaatgctgttgcagccatagcaaatgttcggcaaccatatagctgtcaacgcgccagttgtcggaaaggccaattagcgcgccgaggcctatcttatcaatccccgcacgccccagccgatccggcgtttccagccgccagaagaagtcctgttttttgcctttcagatgatggcgggcataagtcgcctcgtgatatgtctcctgataaaccatcacgccatccagaccaagttgctttaactcggcgtattccgtctccgccagcggttgcacttccatctgtagactagagaactgttcacgaagggcagggagatgacgacgaaagtaatccatccccactttcgcctgatgttcaccagtgactaacagcagatgttcaaagcccatctcccgtatagcggcactttccctggcaatatccgcttcatccagcgttttgcgcttgatgcgattactcatggaaaatccacagtacgtgcagtcgttagcgcaaagattggaaagataaagcgggacgtagaaactaactgtgttgccaaatcgctgacgggtcagacgctgcgcccgttgggccagttgttccagatagccactggcggcagggcttaacagcgccatcatgtcgtcgcgggtgagttggctggcatttagcgcccgctctacgtcagcagccgttttgccgttgatacgcaggcggatgtcgtcccagtccagttgtcgccagcgatcgctgaaggttttcatgcgcttgcctccagaaatccggtcagcgggctggtggcatgagcaaaataactgcggctgcccggtccggactgacgtgccagtaggcctgcttctaccgccagacgaaatgccttcgccatgttgacgggatcgtccgcgacggcaatcgccgtattcactaacaccgcgtcggcccccatttccagcgcctgcgcggcatggctgggaacgccgatgccagcatcgacaaccaccggcactgtggcctgctggataataatctccagcatggcgcgggtttccagtccctgattgctgccaatcggcgcgccgagcggcatcaccgctgcacagccgacttcttccagacgtttacacaataccggatcggccccgcagtaaggcagcacgacaaatccctgttgtaccagcgtttcggcggctttcagggtttcgatgggatcgggcaacagccagcgggcgtcagggtgaatctctaattttaaccagtttgtgcctaacgcttcacgagccagatgggcggcgaaaatggcttcttccgctgttttcgccccggatgtatttggcagcagggtcacacccgccgcgataagcggttcgaggatagcgtcgttgtgctggcgcaagtcgacacgtttcatcgccagtgtcaccagctggctgccggaagcgcggatcgcctccaccatcagttgactagaagcgaatttccctgtgccggtaaacagatgactatcaaacgttttgtccgcaatacgtaacatttcaaccccctgcaataacctgaaaaagcaggatctggtcgccatcctgcacgatatgttgcgcccactgctcacgcgggacgatttgctgattaatcgccagagccgcgcccgcttgtcgttggtcgagttgctccagtagttcgtgaacagtttgcccggcggcgcactgcatcgcttgatcgttaaacaggatctgcattgcttcctccgcataccgggcaaccactggcgcggcgcaacgccaggctgcgccactggctgcttttaccgtcgaacagtcggagttctcccgcaggtgtctctataccgcttaataacttaatggcttccagtgcctgcaaagtgcccataaccccgaccaccgggccaaccacgcccgccgtgcggcagttgcgttctggctcctggttatctggccacaggcagcggtaacacccctgctcccagggcggcgtcagtaccatcaactgaccgccaaatccgaccgcgctggcggtgataagcggcgtgttgagtgccacgcaggcggcattaatctcctggcgagtcgccatattgtcggtacagtcgagcaccacatcggcccgtgcaaccgcatcttttaacgcctcacccgttaaccgttgttgtaatgctgtcagttgaatgtcgggattcaactgtgtcagtcgctgttggctgacctggcttttcgggcgatcgatatcttcagtggtaaagaggatttgtcgttgcagattgcttaaatgcacatcgtcgtcatctgccagtaccagcgtcccgacgccagcgcccgccaggtacagcgcagcaggtgtacccagcccgcccagaccgataatcagcacctggctgtcgagcagtttttgctgcccgtccagagcgatatcgtcgagcaggatttggcggctataacgcataaagtcacggtcattcatcgccaactcctgcaatttccagcaactgtgccgttgccaaacgccagtctgcggcttgagtaatggcgctgacgacggcgatactgccgacacccgttgctatcaccgcaggcgcgcgtgccagactgataccgccaatcgccacggtgggataatccgccagtcgctcaacatgccgtgccagctgttccagcccctgcggtgcagaaggcatctgtttggtttgcgtcgggaacacatgtcccagcgcgatataagaggggcgtgctgccagcgcgacgtcgatttccatatcgtcatgtgtgctaacgcccagccgcaggcctgccgcgcggatggcattgagatcggtggcttgcaaatcttcctgccccaaatggacgccatacgcctgatgcttgatcgccagccgccagtaatcgttgataaacaatcgcgcgttatagcggcggcccagcgcaattgccgccacgacatcggcttccacctcttcatcgcgccgatctttgatgcgtagctggagagtacgtacgcctgcatccaacagacgttcgatccactgtacgctgtccaccaccgggtacagtccactacgaaaaggtacaggaggaaaatcaggctgatacatcacgcttcctccttacgcaggtagatttctccgcctctggcacggaagttctcgctcatatccgccattcccatttcaatagtttgcgtggcggcgtaatcacgcacttcctggctgattttcatgctgcagaatttcggcccacacatggagcaaaaatgggcgactttaccactctcttgcggcagggtttcatcgtgataagcgcgggcggtaaacgggtcgagggccagattaaactggtcttcccagcgaaattcgaagcgggctttgctcatggcgttatcgcgaatttgcgcgcccggatgccctttcgccaggtcagcggcgtgggcagcaatcttataggtgataagcccctgcttaacatcttctttattgggcagacccagatgctcttttggcgttacgtaacagagcatcgcgcagccaaaccagccaatcatcgccgcaccaatcccgctcgtgaagtggtcatagcccggcgcaatatcggtagttagcggccccagagtgtaaaacggcgcttcgtggcagtgctctaactcctcggtcatattgcggcggatcatctgcatcggcacgtggcctgggccttcaatcatcacctgcacgtcatattcccaggcaattttggtcagttcgcccagcgtatgcagctcggcaaactgcgcttcatcgttggcgtcctgaatagaaccggggcgcagaccgtcgcccaggctcaggctaacgtcataagcggcacagatttcacaaatttcgcggaagtgttgatagaggaaattttcctgatgatgggagaggcaccatttcgccataatgctaccgccgcgagagacgataccggtcaggcgtttcgcggtcatcggcacatagcgcagcagtacgcccgcatggatagtgaagtaatccacaccttgctcggcctgttccagcagcgtgtcgcggaacgcttcccaggtaagatcttcggcgatcccgttaaccttctccagcgcctggtagatcggcactgtaccgatcggcaccgggctgttacgcaaaatccactcgcgggtttcgtgaatatagcgaccggtggagagatccatcaccgtatccgctccccagcgcgtggaccataccagcttttccacttcttcttcgatggaagaggtgaccgcgctgttgccgatattggcgttaacttttaccaggaaattgcgaccaataatcatcggctcgctttccggatgattaatgttggccgggataatcgcacgtccggcagcaacttcatcacggacaaattccgcagtgatattttccggcagatgtgcgccaaagctcattcccggatgctggtggcgtaaaacctcgctacggatgcgctcgcggcccatattctcgcggatggcgatgaattccatttccggcgtgatgatgccctggcgggcgtagtgcagttgggtgacacggcgtcctgctttggcgcgttttggtgttagtacgccgctaaaacgcagttcgtcgaggccatcatctgccagccgcgctttagtgtaatcggaactgcgcacggtaagttcttcggtatcgccgcgcgcatcgatccacggctggcgtagttttgccagcccttgctgcacgttaatggcaatctgcggatcaccatacgggccggaggtgtcgtagaccggaatcgcttcgttttcttcgtactgcggctgttctttgctaccgccaattagcgtcgggctaagctggatctcacgcatcggcacgcgcacgccggggtgtgtgccagtgatataaatgcgtttactgttgggaaaggcggtgccttccagggtgtcgataaaatgttgggcccgggcgcgttgttcgcggcgggtcagttttgttgcagacatagctcattccaaaaagttaaggacgtggcttgtcagacgacggatgaagcaagagacgatcgccgcaggggcgatgcgatagcagattaactcttgttcccttcgcaggtattagcctgatcaggttccgcggatcccgaataaacggtctcagccagttaaggcactccgacaagaaattagccccgcaaatggggcattgaatgtaaattacgcgttaacagcgcagaactcaagcaggatgtttgacgcgggcggcgtcaagcaccagcagaatcagcttatcttccagcacaaagcgcgcttccagcgcctcgccgatgtcagataaaacctgttgaaactcaaggtaattatcatgatcgatggcggtttccagactggaatcgtagtaatccataatctgttgagtattggcttcgagttgcggccaaatcttcgcggcgcgcgcgagttgcccgttgccttccagcttatgaagaatgcgctcataaatactgaaatgtccggcagacaagtaatcgaccaggctctgacaaaaatcatcaagggctttttcgtttagcctcatgtagctttctttgccaggcttaatgccaaccagattgtagtaagccacgagcagatgcttacgtacatgtagccagcgatcaaccagtttgttacttcctctgacgcgctccgtcaggttatcgagctggttaagcatgattgactccgcaagtttgtattcaaaaactgctcagtgagaaatgtaaaaaccatgttaaacatgccagtgatgcaaaggtagtgcaagagctatggatcgtataattgaaaaattagatcacggctggtgggtcgtcagccatgaacaaaaattatggttgccgaagggagaattgccatatggcgaagcggcaaatttcgatcttgtgggtcagcgcgcactacaaatcggcgaatggcagggggaacctgtttggttagtacaacagcagcggcgtcacgatatggggagcgtacgtcaggtcattgatctcgatgttgggctgtttcaactggccggacgaggcgtacaactggcggagttttaccgaagtcataaatactgtggttactgcgggcatgaaatgtatccgagcaaaaccgaatgggcgatgctgtgcagccattgccgtgagcgttactacccgcaaatcgccccctgcattattgttgccatccgtcgcgatgatagcatcctcctcgcccagcatacccgccatcgtaacggtgtccatacagtacttgccggattcgtcgaagtgggcgaaaccctcgagcaggcagtcgcgcgggaagtgatggaagagagcggaattaaagttaaaaacttgcgttacgtgacttctcagccgtggccgtttcctcagtctttaatgaccgcgtttatggcggaatatgacagcggcgacatcgtgatcgacccgaaagaattgctcgaggcgaactggtatcgctatgacgatttgccgttactcccgccgcccggcaccgtagcgcgccgtctgatagaagatacggtggcgatgtgtcgggcagagtatgagtgatgatacactgaccgcctgacgcactaaggaacagccaaaatgaccgaacttaaaaacgatcgttatctgcgggcgctgctgcgccagcccgttgatgtcactccagtatggatgatgcgccaggcgggtcgctatctaccggaatataaagccacgcgcgcccaggcaggcgattttatgagcctgtgcaaaaacgccgagctggcgtgcgaagtgactttgcaaccgctgcgtcgctacccgctggatgcggcgatcctcttttccgatatcctcaccgtgccggacgcgatggggttagggctctattttgaagccggagaaggtccgcgttttaccagcccagtcacctgcaaagctgacgtcgataaactgccaattccggacccggaagatgaactgggttacgtgatgaacgcggtgcgtaccattcgtcgcgaactgaaaggcgaagtgccgctgattggtttttccggcagcccgtggacgctggcgacctacatggtggaaggcggcagcagcaaagccttcaccgtgatcaaaaaaatgatgtatgccgatccgcaggcgctgcacgctctgctcgataaactggcgaaaagcgtcactttgtatctgaatgcgcagattaaagccggtgctcaggcagtgatgattttcgacacctggggcggcgtgcttaccgggcgcgattatcaacagttcagcctctattacatgcataaaattgttgatggtttactgcgtgaaaacgacggtcgccgcgtaccggtcacgctgtttaccaaaggcggcggacagtggctggaagccatggcagaaaccggttgcgatgcgctgggcctcgactggacaacggacatcgccgatgcgcgccgccgtgtgggcaataaagtcgcgttgcagggtaatatggatccgagcatgctgtacgcgccgcctgcccgcattgaagaagaagtagcgactatacttgcaggtttcggtcacggcgaaggtcatgtctttaaccttggtcacggcattcatcaggatgtgccgccagaacatgctggcgtgttcgtggaggcagtgcatcgactgtctgaacagtatcaccgctaaggagtgattatggatctcgcgagtttacgcgctcaacaaatcgaactggcttcttctgtgatccgcgaggatcgactcgataaagatccaccggatctgatcgccggagccgatgtcgggtttgagcagggcggagaagtgacgcgagcggcgatggtgctgctgaaatatcccagccttgagctggtcgagtataaagttgcccgcatcgccaccaccatgccttacattccaggttttctttccttccgcgaatatcctgcgctgctggcagcgtgggagatgctgagccaaaagccggatttagtgtttgtcgatggtcatgggatcagccatcctcgccgtcttggcgtcgccagccattttggcttattggtggatgtgccgaccattggcgtggcgaaaaaacggctctgcggtaaattcgaaccgctctccagcgaaccgggcgcgctggccccactgatggataaaggcgagcagctggcctgggtctggcgcagcaaagcgcgctgtaacccgttgtttatcgctaccggccatcgggtcagcgtggacagcgcgctggcgtgggtacaacgctgcatgaaaggctatcgtctgccggagccaacgcgctgggcggacgcggtggccagcgaacgtccggcgttcgtgcgctatacagcaaatcagccctaattcaggtaaactgcggataatttccgtatttgagaactcaacatgttacaaaacccaattcatctgcgtctggagcgcctggaaagctggcagcatgtcactttcatggcttgcttatgcgaacgcatgtaccccaattacgccatgttctgccagcaaaccggttttggtgatgggcaaatttaccgtcgcattctcgatctcatctgggaaacgctgaccgttaaagacgcaaaagtaaatttcgacagccaactggagaaatttgaagaagcgattcctagtgccgacgatttcgatctgtacggcgtttatccggcaatcgatgcctgcgtggcgttaagtgaactggtccatagccgtttgagtggtgaaacgctcgaacacgcggtggaagtgagtaagacctccatcacgaccgttgcgatgctggaaatgactcaggctggtcgcgaaatgagcgatgaagagcttaaagaaaacccagctgtagagcaagaatgggacattcagtgggaaatattccgacttttagctgagtgcgaagaacgcgatatcgagctgataaaaggccttagggcagacctgcgtgaggcgggtgagagcaatattggtataatttttcagcaataagaccagaaaacgtgatttaacgcctgatttgtcgtacctggagtcttccctttcgcccccgtctggtctacatttggggggcgaaaaaaagtggctatcggtgcgtgtatgcaggagagtgctattctggcatttccgtcgcactcgatgcttagcaagcgataaacacattgtaaggataacttatgaacaagactcaactgattgatgtaattgcagagaaagcagaactgtccaaaacccaggctaaagctgctctggagtccactctggctgcaattactgagtctctgaaagaaggcgatgctgtacaactggttggtttcggtaccttcaaagtgaaccaccgcgctgagcgtactggccgcaacccgcagaccggtaaagaaatcaaaattgccgcagctaacgtaccggcatttgtttctggcaaggcactgaaagacgcagttaagtaagattgcgtggcagtgaacagttttaacgaaggggtggttagtccccttttgtctttctggcgtcgaagtttgatgctggctggcgctctgcttctcactgcctgtagtcataactctagtcttcctccctttaccgccagtggatttgctgaagaccagggcgcggtacgcatctggcgaaaagacagcggcgataatgtgcatctgcttgccgtgtttagcccgtggcgcagtggcgataccacgacgcgagagtatcgctggcagggcgataacctcacgctcatcaatatcaatgtttacagcaaaccgccggtgaatattcgcgcgcgttttgacgatcgcggtgatctgagctttatgcaacgtgaatccgatggggaaaagcagcagctttctaacgaccaaatcgatttataccgttatcgtgctgatcagatccgccagattagcgatgccttacgtcaggggagagtcgtgctgcgccaggggcgctggcatgcgatggaacagaccgtgaccacctgcgaagggcaaaccattaaacctgatttagatagccaggcgatagcgcatatcgagcgccgccagagccgctcttctgttgatgtcagcgtggcatggctggaagcgcccgaaggtagccaattactgttagtggcaaactctgatttctgtcgctggcaacccaacgagaaaacgttctgatttaccagtggcccatacccatatgaccgccaccaccgcagccgccgtagcccatgcccattccggctccgcgcggaatacccgcttcagccatcgcgatatctcgtttcacccgtaactcatctaagctctgacgcaaattctccatctctttggcgaccgcgttaattttgctgctatccggtgggttcgcggctaacagggcattgtattcataacgcttcgtcaccagttgctgttgcagtgcgctgctttgagcgtaaaagtcattatggattttctgccacgctgtctgttgttcgctggtcaaaggcgcggcattttgctgccacataccgtgtccgccgtgagcaaatgcagatgtgcttcccatcgccattgcactaagcgccatcattaccagggcaattttcgtgttccgtttcatggttaatcctccagtggttgtcttacttcgggtattgcatcttccgtgccaacgatgaaacgctgatatgacgggtaatctggcatgataaacgagtaaaaatgactcgcctgctgcgggtagcgagtcatttttactcattgaaacttaagcctttgtgttacagcgcagggtaagcgctgataaaagatggcatgatttctgctgtcagaaagggatgagcaggcaaagaagaagatgcgttttatgcaacgttctaaagactccttagctaaatggttaagcgcgatcctccccgtggtcattgttgggctggtgggattgtttgcggtaactgtgattcgtgattatgggcgggcaagcgaggcagaccgccaggcattactggaaaaaggtaatgtgcttatccgcgctctggagagcggaagccgcgtagggatggggatgcgaatgcaccatgtacagcaacaggcgcttctggaagagatggcgggacagccgggagtgttgtggttcgcagtcaccgatgcgcagggcatcattattcttcatagcgaccccgataaggtcgggcgtgcgctctatagcccggatgaaatgcagaaattaaagccagaggaaaactcccgctggcggctgcttgggaaaacggaaactacgcctgcacttgaggtctatcgtttgttccagccaatgagtgcgccctggcggcatggaatgcacaatatgccgcgctgtaacggcaaagctgtgccacaagtagatgcacaacaggctatttttatcgccgttgatgccagtgatctggttgcaacccagagtggggaaaagcgcaataccctgattatcctcttcgccctggcgacggtcttgctggcaagcgtattgagtttcttctggtatcgccgctatctgcgcagccgccagcttctacaagatgaaatgaagcgcaaagagaagctggtggcgctggggcatcttgcggcaggcgttgcccacgaaatccgtaacccactttccagcattaaaggactggcgaaatactttgccgagcgcgcgcctgcagggggagaagcgcatcaactggcgcaggtgatggcgaaagaggccgaccgtttaaaccgcgtggtaagcgagttgctggaactggttaagccaacgcatctggctttgcaggcggtggatctcaacacgctgattaaccacagtttacagctggtaagtcaggatgcaaacagccgggagatccagttacgctttaccgccaacgacacattaccggaaattcaggccgacccggacaggctgactcaggtcctgttgaatctctatctcaatgctattcaggcgattggtcagcatggcgtgattagcgtgacggccagcgaaagcggcgcgggcgtgaaaatcagcgttaccgacagcggtaagggaattgcggcagatcagcttgatgccatcttcactccgtacttcaccactaaagccgaaggcaccggattggggctggcggtcgtgcataatattgttgaacaacacggtggtacaattcaggtcgcaagccaggagggaaaaggcagtacgttcaccctctggcttccggtcaatattacgcgtaaggacccacaaggatgacgcacgataatatcgatattctggtggtggatgatgacattagccactgcactattttgcaggctttactgcgcggctggggctataacgtcgcgctggcgaacagcgggcgacaggcgttggagcaggtgcgggaacaggtttttgatcttgtgctttgcgatgtgcgaatggcggagatggacggcatcgccacgctgaaagagatcaaagcgttaaacccggcaattccggtgctgattatgactgcgtactccagcgtcgagacggcggtagaggcactgaaaactggggcgctggattatctcatcaagccgctggatttcgataacctacaggcgacgctggaaaaagcgctcgcgcatacgcacagtattgatgctgaaacacctgcggtgactgccagccagttcggtatggtcggtaaaagcccggcgatgcaacacctgctcagtgaaatcgccctcgtcgcgccaagcgaagccacggtactgatccacggcgattccggcaccggtaaagagctggtcgccagggcgattcacgccagtagcgcacgtagcgaaaaaccgctggtaacgctcaactgtgcggcactcaacgaatccttgctggaatctgaattgttcggtcacgaaaaaggggcgtttactggagccgataaacgccgggaagggcgctttgttgaggcggacggcggcacgctgtttctcgatgaaattggcgatatcagcccgatgatgcaggtgcgtctgctgcgtgcgattcaggagcgcgaagttcagcgtgtcggtagcaaccagattatcagcgttgatgtccggctgattgcggcgacccatcgcgatcttgccgcagaggtgaatgccgggcgttttcgccaggatctctactatcgcctgaatgtggtggcgattgaagtaccaagcctgcggcaacggcgggaagatatccctctgctggctggccattttctgcagcgctttgccgagcgtaatcgcaaggcggtaaaaggttttacgccccaggcgatggatctgttgattcattacgactggccgggaaatattcgtgagctggaaaacgcggtggaacgggcagtggtgctgctgaccggggaatatatttccgaacgcgagctgccgctggcgattgccagtacgccgatcccgctgggacaaagtcaggatattcagccgttggtggaagtggaaaaagaggtgattctggcggcgctggagaaaacgggcggcaacaaaaccgaagccgcccgtcagttagggatcacgcgcaaaacgctattggcaaaactgagccgttaattctgctcgcgttcgatagcgcgccagccgatatctttccggcagaagcagtcgtcccagtggatatcggtcattaaggcataggcgcgtttctgcgcttctgccacggtatgacccagcgcggtgacgcacagtacgcgcccgccgttggtcactacctgctcgtcatccgccagttttgtgcccgcgtggaacactttgccgcctgccacttcttccagcggcaggccgtggatcacgtcaccggtgcggtaatcacccggatatccacccgcagccatcaccacgccgagagaagcgcgttcatcccactcggacgttttctcgtccagtttgctttcacaggccgccaggcagagctcaaccagatcggacttcatgcgcagcataatcggctgggtttccggatcgccaaagcggcagttaaattcaataaccttcggattgccctgtttgtcgatcatcaggcccgcgtagagaaaaccggtgtaggtgttgccttccgccgccatgcctttcacggttggccagataatacgttccatggtgcgctgatgaacgtcatcggttactaccggcgcgggggagtaagcgcccatcccgccggtgtttggtccggtatctttatcgcctacgcgtttgtgatcctggctggtagccatcggcagcacatgctcgccgtccaccatcacgataaagctcgcttcttcgccatcgaggaactcttcgataacgatgcgatgacccgcgtcgccaaaagcgttgcccgccagcatatcgtgaacagccgcttccgcttcttccagcgtcatcgccacgataacgcctttcccggcagccagaccgtccgctttaatgacgattggcgcgcctttctcacgcagatacgccagcgcaggttctacctcggtgaagttctggtattccgccgtagggatcttatggcgggccaggaaatctttggtaaacgctttactgccttccagttgggccgcacctgcggttgggtcgaagattttcagcccggcggcgcggaaggtatcgaccacgcctttcaccagcggcgcttccgggccgacgatggtcagatcaatcttttcgttttgtgcgaaatccaacagcgccgggatatcggtcacgccaatagcaacgttttgcagcgcgggttccagtgcagtgcctgcattacccggagcaacaaaaacagtctcaaccagcgggctctgggccgctttccaggccagcgcgtgctcgcgcccgccgttaccaatcactaatactttcatctattgctccattaatggcggaagtggcgcatgtcggtgaagagcatcgcaataccgtgctcgtcggcggcggcaatcacttcgtcatcacggatagaaccgccaggctggattacgcaggtcacgcccgcagcggcggcggcatcaataccgtcgcggaacgggaagaacgcgtcagaagccatgctggaacctttcacttccaggccttcatcggccgctttaataccggcgatttttgcggagtacacgcggctcatctggcccgcgccaatgccgatagtcatattgtttttggcatagacgatagcgttggatttcacaaacttcgccaccttccagcagaacagcgcatcacgcagttcctgttcgctcggctgacgtttggtcaccacgcgcagttcttccgcaccgaccatccccaggtcacgatcctgaaccagcagaccgccgttcacgcgtttgaaatcgaggcccggaacacgctcgccccactgaccgcaggtcagaacgcgtacgttctgtttggcggcggtgattttcagggcttcttcgctggcggacggcgcaataatcacttcgacaaactgacgagaaatgatggcctgtgcggtttccgcatccagctcgcggttaaaggcaatgatgccgccgaatgcggaggttgggtcggttttgtacgcgcgatcgtaagcatcaagaatggaattgccgatagccacgccgcaagggttggcgtgcttcacaatcacacatgccggctcggcgaactctttcacgcactccagcgccgcatcggtatcggcgatgttgttataagagagggctttaccctgaacctgggttgcggtagcaacggaggcttctttcacattctcttctatatagaaggcagcctgctggtggctgttctcgccgtaacgcatatccagcttcttaatgaagttcaggttcagcgtgcgtgggaagcgaccggcggcttctttgctttcaccgtggtaagccggaaccatgctgccgaagtagttggcaatcatgctgtcgtaggcggcagtgtgttcgaaggctttgatggcgaggtcgaaacgggttgcaagcgtcaggcttccttcgttgtcatccatctctttaataatggcgtcatagtcgctgctcttcaccacgattgcgacatctttatggttcttggcggcggagcgcaccatcgttgggccgccgatatcgatgttctcaaccgcatcttccaggctgcaaccttcacgggccacggtctgggcgaacggatacaggttaacaaccaccatatcgataggctggatctgatgttcttccataatggcatcgtcctggccgcgacggcccagaatgccaccatgtactttcggatgcagggtcttcacgcgtccatccatcatctccgggaaaccggtgtaatcggaaacttcggttaccggcagacctttttctgctaacagacgggcagtgccccctgtagacagcagctccacaccgcgtgcggaaagtgcctgggcgaattcgacgataccggctttgtcagaaacactgagcagagcgcggcggactggacgacgttgttgcatggtaaatcccctggatttgactattacagagagcgttagctgaatttttcgcgaaaaactcagctaacgcccctaacggggcatccttatttttcgcccgcattgtaacgaaaacgtttgcgcaacgctcgcgaatttttctctttcaatggtgatcacaattttgactgtggttaccgtgggcaaaatacagaaattacattgatgattgtggataactctgtgcgtaaaaaggtataaagcgggcttttgctggggaatgcagcagtcagtcatttttctgcaatttttctattgcggcctgcggagaactccctataatgcgcctccatcgacacggcggatgtgaatcacttcacacaaacagccggttcggttgaagagaaaaatcctgaaattcagggttgactctgaaagaggaaagcgtaatatacgccacctcgcgacagtgcgctaaagcgcgtcgcaactgctctttaacaatttatcagacaatctgtgtgggcactcgaagatacggattcttaacgtcgcaagacgaaaaatgaataccaagtctcaagagtgaacacgtaattcattacgaagtttaattctttgagcatcaaacttttaaattgaagagtttgatcatggctcagattgaacgctggcggcaggcctaacacatgcaagtcgaacggtaacaggaagaagcttgcttctttgctgacgagtggcggacgggtgagtaatgtctgggaaactgcctgatggagggggataactactggaaacggtagctaataccgcataacgtcgcaagaccaaagagggggaccttcgggcctcttgccatcggatgtgcccagatgggattagctagtaggtggggtaacggctcacctaggcgacgatccctagctggtctgagaggatgaccagccacactggaactgagacacggtccagactcctacgggaggcagcagtggggaatattgcacaatgggcgcaagcctgatgcagccatgccgcgtgtatgaagaaggccttcgggttgtaaagtactttcagcggggaggaagggagtaaagttaatacctttgctcattgacgttacccgcagaagaagcaccggctaactccgtgccagcagccgcggtaatacggagggtgcaagcgttaatcggaattactgggcgtaaagcgcacgcaggcggtttgttaagtcagatgtgaaatccccgggctcaacctgggaactgcatctgatactggcaagcttgagtctcgtagaggggggtagaattccaggtgtagcggtgaaatgcgtagagatctggaggaataccggtggcgaaggcggccccctggacgaagactgacgctcaggtgcgaaagcgtggggagcaaacaggattagataccctggtagtccacgccgtaaacgatgtcgacttggaggttgtgcccttgaggcgtggcttccggagctaacgcgttaagtcgaccgcctggggagtacggccgcaaggttaaaactcaaatgaattgacgggggcccgcacaagcggtggagcatgtggtttaattcgatgcaacgcgaagaaccttacctggtcttgacatccacggaagttttcagagatgagaatgtgccttcgggaaccgtgagacaggtgctgcatggctgtcgtcagctcgtgttgtgaaatgttgggttaagtcccgcaacgagcgcaacccttatcctttgttgccagcggtccggccgggaactcaaaggagactgccagtgataaactggaggaaggtggggatgacgtcaagtcatcatggcccttacgaccagggctacacacgtgctacaatggcgcatacaaagagaagcgacctcgcgagagcaagcggacctcataaagtgcgtcgtagtccggattggagtctgcaactcgactccatgaagtcggaatcgctagtaatcgtggatcagaatgccacggtgaatacgttcccgggccttgtacacaccgcccgtcacaccatgggagtgggttgcaaaagaagtaggtagcttaaccttcgggagggcgcttaccactttgtgattcatgactggggtgaagtcgtaacaaggtaaccgtaggggaacctgcggttggatcacctccttaccttaaagaagcgttctttgcagtgctcacacagattgtctgatagaaagtgaaaagcaaggcgtcttgcgaagcagactgatacgtccccttcgtctagaggcccaggacaccgccctttcacggcggtaacaggggttcgaatcccctaggggacgccacttgctggtttgtgagtgaaagtcacctgccttaatatctcaaaactcatcttcgggtgatgtttgagatatttgctctttaaaaatctggatcaagctgaaaattgaaacactgaacaacgaaagttgttcgtgagtctctcaaattttcgcaacacgatgatgaatcgtaagaaacatcttcgggttgtgaggttaagcgactaagcgtacacggtggatgccctggcagtcagaggcgatgaaggacgtgctaatctgcgataagcgtcggtaaggtgatatgaaccgttataaccggcgatttccgaatggggaaacccagtgtgtttcgacacactatcattaactgaatccataggttaatgaggcgaaccgggggaactgaaacatctaagtaccccgaggaaaagaaatcaaccgagattcccccagtagcggcgagcgaacggggagcagcccagagcctgaatcagtgtgtgtgttagtggaagcgtctggaaaggcgcgcgatacagggtgacagccccgtacacaaaaatgcacatgctgtgagctcgatgagtagggcgggacacgtggtatcctgtctgaatatggggggaccatcctccaaggctaaatactcctgactgaccgatagtgaaccagtaccgtgagggaaaggcgaaaagaaccccggcgaggggagtgaaaaagaacctgaaaccgtgtacgtacaagcagtgggagcacgcttaggcgtgtgactgcgtaccttttgtataatgggtcagcgacttatattctgtagcaaggttaaccgaataggggagccgaagggaaaccgagtcttaactgggcgttaagttgcagggtatagacccgaaacccggtgatctagccatgggcaggttgaaggttgggtaacactaactggaggaccgaaccgactaatgttgaaaaattagcggatgacttgtggctgggggtgaaaggccaatcaaaccgggagatagctggttctccccgaaagctatttaggtagcgcctcgtgaattcatctccgggggtagagcactgtttcggcaagggggtcatcccgacttaccaacccgatgcaaactgcgaataccggagaatgttatcacgggagacacacggcgggtgctaacgtccgtcgtgaagagggaaacaacccagaccgccagctaaggtcccaaagtcatggttaagtgggaaacgatgtgggaaggcccagacagccaggatgttggcttagaagcagccatcatttaaagaaagcgtaatagctcactggtcgagtcggcctgcgcggaagatgtaacggggctaaaccatgcaccgaagctgcggcagcgacgcttatgcgttgttgggtaggggagcgttctgtaagcctgcgaaggtgtgctgtgaggcatgctggaggtatcagaagtgcgaatgctgacataagtaacgataaagcgggtgaaaagcccgctcgccggaagaccaagggttcctgtccaacgttaatcggggcagggtgagtcgacccctaaggcgaggccgaaaggcgtagtcgatgggaaacaggttaatattcctgtacttggtgttactgcgaaggggggacggagaaggctatgttggccgggcgacggttgtcccggtttaagcgtgtaggctggttttccaggcaaatccggaaaatcaaggctgaggcgtgatgacgaggcactacggtgctgaagcaacaaatgccctgcttccaggaaaagcctctaagcatcaggtaacatcaaatcgtaccccaaaccgacacaggtggtcaggtagagaataccaaggcgcttgagagaactcgggtgaaggaactaggcaaaatggtgccgtaacttcgggagaaggcacgctgatatgtaggtgaggtccctcgcggatggagctgaaatcagtcgaagataccagctggctgcaactgtttattaaaaacacagcactgtgcaaacacgaaagtggacgtatacggtgtgacgcctgcccggtgccggaaggttaattgatggggttagcgcaagcgaagctcttgatcgaagccccggtaaacggcggccgtaactataacggtcctaaggtagcgaaattccttgtcgggtaagttccgacctgcacgaatggcgtaatgatggccaggctgtctccacccgagactcagtgaaattgaactcgctgtgaagatgcagtgtacccgcggcaagacggaaagaccccgtgaacctttactatagcttgacactgaacattgagccttgatgtgtaggataggtgggaggctttgaagtgtggacgccagtctgcatggagccgaccttgaaataccaccctttaatgtttgatgttctaacgttgacccgtaatccgggttgcggacagtgtctggtgggtagtttgactggggcggtctcctcctaaagagtaacggaggagcacgaaggttggctaatcctggtcggacatcaggaggttagtgcaatggcataagccagcttgactgcgagcgtgacggcgcgagcaggtgcgaaagcaggtcatagtgatccggtggttctgaatggaagggccatcgctcaacggataaaaggtactccggggataacaggctgataccgcccaagagttcatatcgacggcggtgtttggcacctcgatgtcggctcatcacatcctggggctgaagtaggtcccaagggtatggctgttcgccatttaaagtggtacgcgagctgggtttagaacgtcgtgagacagttcggtccctatctgccgtgggcgctggagaactgaggggggctgctcctagtacgagaggaccggagtggacgcatcactggtgttcgggttgtcatgccaatggcactgcccggtagctaaatgcggaagagataagtgctgaaagcatctaagcacgaaacttgccccgagatgagttctccctgactccttgagagtcctgaaggaacgttgaagacgacgacgttgataggccgggtgtgtaagcgcagcgatgcgttgagctaaccggtactaatgaaccgtgaggcttaaccttacaacgccgaaggtgttttggcggattgagagaagattttcagcctgatacagattaaatcagaacgcagaagcggtctgataaaacagaatttgcctggcggcagtagcgcggtggtcccacctgaccccatgccgaactcagaagtgaaacgccgtagcgccgatggtagtgtggggtctccccatgcgagagtagggaactgccaggcatcaaattagaaaaaccccggtccataaggccggggttttttgcatatcaattatttgcatgatgaagggaatctcatgagtgttctgtatatccaaattcgtcgtaatcaaattactgttcgcgatcttgaaagcaaacgtgaagtgagtggagacgctgccttcagtaaccagcgcctgttaatcgccaatttctttgttgcagaaaaagttctgcaagatcttgttctgcaactccacccacgtagtacctggcattcttttttgccagcaaaacgtatggatattgttgtgagcgcactggaaatgaatgagggcggtttgagtcaggttgaggaacgcattctccatgaagtggtcgctggggcaacgttaatgaaatatcgccagttccacatccatgcgcaaagtgcggtactcagtgatagtgcggtcatggcaatgcttaagcagaaataatcgtgtcaccattggtgggtactaaacctgaagttcagcccaccgggatgagaaaaaatcgcttacgcccccacatacgccagattcagcaacggatacggtttccccaaatcgtccacctcagagcgtcccgtaaccttaaaacccaccttcttatagaacccaaccgcctgctcattttgctcattaacgttggttgtcagttccggtgccatgctgagcgcatgctccaccagcacccgacctacgccgcagccgcgcacatcaggatcgataaacagcgcatccatatgctgcccacttagcaacataaatccaaccggctgatcccgctcattaaccgcgacccacaacggcgcttccggcaggaaggaacgaactaggtcctccagctcggtccgatactctgcacttagaaaatcgtgagtggcatcgacagaacgacaccaaatcgcaacgagttcctccccttcctcatgccgactgcggcgaatactaataaccattttctctccttttagtcattcttatattctaacgtagtcttttccttgaaactttctcaccttcaacatgcaggctcgacattggcaaattttctggttatcttcagctatctggatgtctaaacgtataagcgtatgtagtgaggtaatcaggttatgccgattcgtgtgccggacgagctacccgccgtcaatttcttgcgtgaagaaaacgtctttgtgatgacaacttctcgtgcgtctggtcaggaaattcgtccacttaaggttctgatccttaacctgatgccgaagaagattgaaactgaaaatcagtttctgcgcctgcttagtaacagtcctttgcaggtcgatattcagctgttgcgcatcgattcccgtgaaagccgcaacacgcccgcagagcatctgaacaacttctactgtaactttgaagatattcaggatcagaactttgacggtttgattgtaactggtgcgccgctgggcctggtggagtttaatgatgtcgcttactggccgcagatcaaacaggtgctggagtggagcaaagatcacgtcaccagcacgctgtttgtctgctgggcggtacaggccgcgctcaatatcctctacggcattcctaagcaaactcgcaccgaaaaactctctggcgtttacgagcatcatattctccatcctcatgcgcttctgacgcgtggctttgatgatagtttcctggcaccgcatagccgctatgctgactttccggcagcgttgattcgtgattacaccgatctggaaattctggcagagacggaagaaggggatgcatatctgtttgccagtaaagataagcgcattgcctttatgacgggccatcccgaatatgatgcgcaaacgctggcgcaggaatttttccgcgatgtggaagccggactagacccggatgtaccgtataactatttcccgcacaatgatccgcaaaatacaccgcgagcgagctggcgtagtcacggtaatttactgtttaccaactggctcaactattacgtctaccagatcacgccatacgatctacggcacatgaatccaacgctggattaatcttctgtgatagtcgatcgttaagcgattcagcaccttacctcaggcaccttcgggtgccttttttatttccgaaacgtacctcagcaggtgaataaattttattcatattgttatcaacaagttatcaagtatttttaattaaaatggaaattgtttttgattttgcattttaaatgagtagtcttagttgtgctgaacgaaaagagcacaacgatccttcgttcacagtggggaagttttcggatccatgacgaggagctgcacgatgactgaacaggcaacaacaaccgatgaactggctttcacaaggccgtatggcgagcaggagaagcaaattcttactgccgaagcggtagaatttctgactgagctggtgacgcattttacgccacaacgcaataaacttctggcagcgcgcattcagcagcagcaagatattgataacggaacgttgcctgattttattagcgaaacagcttccattcgcgatgctgattggaaaattcgcgggattcctgcggacttagaagaccgccgcgtagagataactggcccggtagagcgcaagatggtgatcaacgcgctcaacgccaatgtgaaagtctttatggccgatttcgaagatagtctggcaccagactggaacaaagtgatcgacgggcaaattaacctgcgtgatgcggttaacggcaccatcagttacaccaatgaagcaggcaaaatttaccagctcaagcccaatccagcggttttgatttgtcgggtacgcggtctgcacttgccggaaaaacatgtcacctggcgtggtgaggcaatccccggcagcctgtttgattttgcgctctatttcttccacaactatcaggcactgttggcaaagggcagtggtccctatttctatctgccgaaaacccagtcctggcaggaagcggcctggtggagcgaagtcttcagctatgcagaagatcgctttaatctgccgcgcggcaccatcaaggcgacgttgctgattgaaacgctgcccgccgtgttccagatggatgaaatccttcacgcgctgcgtgaccatattgttggtctgaactgcggtcgttgggattacatcttcagctatatcaaaacgttgaaaaactatcccgatcgcgtcctgccagacagacaggcagtgacgatggataaaccattcctgaatgcttacagtcgcctgttgattaaaacctgccataaacgcggtgcttttgcgatgggcggcatggcggcgtttattccgagcaaagatgaagagcacaataaccaggtgctcaacaaagtaaaagcggataaaagcctggaagccaataacggtcacgatggcacatggatcgctcacccaggccttgcggacacggcaatggcggtattcaacgacattctcggctcccgtaaaaatcagcttgaagtgatgcgcgaacaagacgcgccgattactgccgatcagctgctggcaccttgtgatggtgaacgcaccgaagaaggtatgcgcgccaacattcgcgtggctgtgcagtacatcgaagcgtggatctctggcaacggctgtgtgccgatttatggcctgatggaagatgcggcgacggctgaaatttcccgtaccagcatctggcagtggatccatcatcaaaaaacgttgagcaatggcaaaccggtgaccaaagccttgttccgccagatgctgggcgaagagatgaaagtcattgccagcgaactgggcgaagaacgtttctcccaggggcgttttgacgatgccgcacgcttgatggaacagatcaccacttccgatgagttaattgatttcctgaccctgccaggctaccgcctgttagcgtaaaccaccacataactatggagcatctgcacatgaaaacccgtacacaacaaattgaagaattacagaaagagtggactcaaccgcgttgggaaggcattactcgcccatacagtgcggaagatgtggtgaaattacgcggtagtgtcaatcctgaatgcacgctggcgcaactgggcgcagcgaaaatgtggcgtctgctgcacggtgagagcaaaaaaggctacatcaacagcctcggcgcactgactggcggtcaggcgctgcaacaggcgaaagcgggtattgaagcagtctatctgagcggatggcaggtagcggcggacgctaacctggcggccagcatgtatccggatcagagcctctatccggcaaacagcgtgccagctgtggtggagcggatcaacaacaccttccgtcgtgccgatcagatccaatggtccgcgggcattgagccgggcgatccgcgctatgtcgattacttcctgccgatcgttgccgatgcggaagccggttttggcggtgtcctgaatgcctttgaactgatgaaagcgatgattgaagccggtgcagcggcagttcacttcgaagatcagctggcgagtgtgaagaaatgcggtcacatgggcggcaaagttttagtgccaactcaggaagctattcagaaactggtcgcggcgcgtctggcagctgacgtgacgggcgttccaaccctgctggttgcccgtaccgatgctgatgcggcggatctgatcacctccgattgcgacccgtatgacagcgaatttattaccggcgagcgtaccagtgaaggcttcttccgtactcatgcgggcattgagcaagcgatcagccgtggcctggcgtatgcgccatatgctgacctggtctggtgtgaaacctccacgccggatctggaactggcgcgtcgctttgcacaagctatccacgcgaaatatccgggcaaactgctggcttataactgcagcccgagcttcaactggcagaaaaacctcgacgacaaaactattgccagcttccagcagcagctgagcgatatgggctacaagttccagttcatcaccctggcaggtatccacagcatgtggttcaacatgtttgacctggcaaacgcctatgcccagggcgagggtatgaagcactacgttgagaaagtgcagcagccggaatttgccgccgcgaaagatggctataccttcgtatctcaccagcaggaagtgggtacaggttacttcgataaagtgacgactattattcagggcggcacgtctagtgtcaccgcgctgaccggctccactgaagaaagccagttctaagcaacaacaaccgttgctgactgtaggccggataaggcgttcacgccgcatccggcaatcggtgcacgatgcctgatgcgacgcttgcgcgtcttatcatgcctacagccgttgccgaacgtaggctggataaggcgtttacgccgcatccggcaattctctgctcctgatgagggcgctaaatgccgcgtggcctggaattattgattgctcaaaccattttgcaaggcttcgatgctcagtatggtcgattcctcgaagtgacctccggtgcgcagcagcgtttcgaacaggccgactggcatgctgtccagcaggcgatgaaaaaccgtatccatctttacgatcatcacgttggtctggtcgtggagcaactgcgctgcattactaacgaccaaagtacggacgcggcatttttactacgtgttaaagagcattacacccggctgttgccggattacccgcgcttcgagattgcggagagcttttttaactccgtgtactgtcggttatttgaccaccgcagccttactcccgagcggctttttatctttagctctcagccagagcgccgctttcgtaccattccccgcccgctggcgaaagactttcaccccgatcacggctgggaatctctactgatgcgcgttatcagcgacctaccgctgcgcctgcgctggcagaataaaagccgtgacatccattacattattcgccatctgacggaaacgctggggacagacaacctcgcggaaagtcatttacaggtggcgaacgaactgttttaccgcaataaagccgcctggctggtaggcaaactgatcacaccttccggcacattgccatttttgctgccgatccaccagacggacgacggcgagttatttattgatacctgcctgacgacgaccgccgaagcgagcattgtttttggctttgcgcgttcttattttatggtttatgcgccgctgcccgcagcgctggtcgagtggctacgggaaattctgccaggtaaaaccaccgctgaattgtatatggctatcggctgccagaagcacgccaaaaccgaaagctaccgcgaatatctcgtttatctacagggctgtaatgagcagttcattgaagcgccgggtattcgtggaatggtgatgttggtgtttacgctgccgggctttgatcgggtattcaaagtcatcaaagacaggttcgcgccgcagaaagagatgtctgccgctcacgttcgtgcctgctatcaactggtgaaagagcacgatcgcgtgggccgaatggcggacacccaggagtttgaaaactttgtgctggagaagcggcatatttccccggcattaatggaattactgcttcaggaagcagcggaaaaaatcaccgatctcggcgaacaaattgtgattcgccatctttatattgagcggcggatggtgccgctcaatatctggctggaacaagtggaaggtcagcagttgcgcgacgccattgaagaatacggtaacgctattcgccagcttgccgctgctaacattttccctggcgacatgctgtttaaaaacttcggtgtcacccgtcacgggcgtgtggttttttatgattacgatgaaatttgctacatgacggaagtgaatttccgcgacatcccgccgccgcgctatccggaagacgaacttgccagcgaaccgtggtacagcgtcagcccgggcgatgttttcccggaagagtttcgccactggctatgcgccgacccgcgtattggtccgctgtttgaagagatgcacgccgacctgttccgcgctgattactggcgcgcactacaaaaccgcatacgtgaagggcatgtggaagatgtttatgcgtatcggcgcaggcaaagatttagcgtacggtatggggagatgcttttttgagtaaagcttccatataatttttctccgcaatgtatcgagggttatccgtaaagccaaagctttcagccatcttatttaatgtattaaggattaattcagcaataacccggtgaccaaattcaaaagccaactcaaaggcagagtatttttgtggggctttgtgttgccaaaaatccataatatcttcagcggtaaatccaaacaggcgtgcatggtcagataaagcaagataaaccgtctctacaacattttgttgtttatgctgtatcgcactaaacaaaccgggatattcattagaattatttgccaggaggaggggcttcatattttttttatcgaatttaaacgtattaaacagagtgggtaatgcgttaaaaatagtattaataacgttcatgtgtccgcgctgcatggccataaacaaacccgtgtcgcgcgcaagacttttagcggtcagaagatctacaatatcggaagcactaatgttaatttcctgggctaggctgggcaatgcttcaagaataactttcacgatatcgctatgtccattttgcatcgccagatatagtcctgggcaaccataaaaatcctttgccttcaggagatcgagtacctgttctttagtcaaatgacatgtgcgaattaacaaaggtaacgcgttcaaaacaattttcagcatgtcggcatcaccattcgccataacatggtataaaacatggctggacgttctatttttggcactcaggaatttatacacttgttcgttatctaaatgatgtgttgcggccagtttaggtaaggcgttcagaatgctggttacaacatttttatccttacgacttatcgctaaaaataatccagaaaaaccatttttatcttttgcctccagaatatgcatgagattttttttgctgagtaatccttcatatcctgtttcactcaaactattgaaaatagtctcaacgatatccgcattaccataatttatagccaaatataaacctggcaggttaatactattataggcagtcaacatttctgttctatgtagttctggcattttctggagttgaatcatcagttgcgtaagttggtgattctgaccaattgccattagcaaattcatcgttgcaggacttaatggaggggttatttcatccacagatccttttaacatcaatagctgttctttcggaagtgctggaattattgcaacagattgattaataacatgatcattactccatttcaggaggctataatctacattcataaaatccatcagagaatagtgtttaatattctctttgctttcgctcataattcttattttatcgttagttacattaggatcataaacgctaaccacgtaatgggtacatccttcagttgtgttctttattcttagccggaccgtcaaagcatggttatccaccagtaatatggctgccataacactgatgccattactttccatcttgtcaaaatatgctttcataactagcccgaaatcaccgcaggcagcaacgcaacgcccctcaggacggctggaaaccaacgccaaagtctggtttttgcattttttgttgaagtgcgtgagaaatttttcagcactagagtaatcatcttgatggggtttgtaatcaacattctgataaatatcattaatatattgtgcagcaatgtgtcggcatactatacggttttggggtcgccccggaaaataacattgaccattaagtttaattcttgggaattctttttcttttctatcactttttaggtttaattcttgtttatcaagagtgtcactgcgttgaggtaaaatttccattaggtatttttcaaatattggggcaatggtttgagtaagtgtcgtgttttcgtttttattaattatcgtaatttctttcttatcagcttgtaagacggacgtggaaaatttaatgacaaaatccttgttgctaaagatatgacgaccattttgtctacagttctcactgaagctttttaatagaggcgtcgccagctccttgccagaaaatttatcctcgagttctttataaaacaattcactcagggtttggtgttcatttgtctgggctgtattattaatatttgcagagaaagaactacgaggaatacgagtaatcatttaaatatctcattgtttattgatgtcttgaattttaactatcagaacagtgaaaaaatttaatatgattacaactaaagaaatatcataaatcgctcaatctcataatgcagccgtaaaagtttcggtggaatgagatcttgcgattttgttaataattaagtggtttgatgtttaaaaataatgctgagttaataaaagtgtgtgaagtgtatgacattaagttattttggcgtcaatgcgattaacagacacccttattctattgccactcaggtatgatgggcagaatattgcctctgcccgccagaaaaagtcagcgcattccaccgtacgccagcgtcacttccttcgccgctttaatcaccatcgcgccaaactcggtcacgcggtcatcggtaatacgactaatcggtccggaaatagaaattgcggcaaacggttcacggtgctcatcgaaaatacacgctgcaaggcaacgtagccccagtgcatgttcctcatcgtcaaaactataaccccgtttgcgcgtttgggcgagatcttcttttaaatgcacaggagacaccagcgttgcgtgggtataggcatgtaaccctttgcggtgcagcagcttcgtcacctgttcttcgctcagttgggctaaaaaggctttacccgcaccggaagcgtgcatcggcaatttaccgccgataggcgcggacattcgcatcagatgcgtacactgtacctggtcgataataatcgcttcgtgatcgctttgatcaagcaccgccatattgaccgtttcgccagactcttccattagattgcgcaggatagggtgaacaatcgctaacaaattacggctctggagaaagctgctgccgaccataaaggcatgtgcgccgattgcccaatgtcccagttcgccaacctgacgcacgaaaccctgctgttgcatcgtggttagcaggcggtgggtcgtggaattgggtaacccggcttgttgcgccagttccgtgagtgccacactgccattggattcggcaatccactccagtaatttcaggccacgcgttaaagactgaacctgtccagtcgctggtgcggtggcaacggcgggttttctgccgcgtttcgcgggaatgggtgcgaccatgacagtctcttttttctgtatcgtggaaatcattttcatttttattgttagctaatgcaatagttactgaactgatccgatgagttaatgttgaacaaatctcatgttgcgtggtggtcgcttttaccacagatgcgtttatgccagtatggtttgttgaatttttattaaatctgggttgagcgtgtcgggagcaagtgtgagcagcaaagtggaacaactgcgtgcgcagttaaatgaacgtattctggtgctggacggcggtatgggcaccatgatccagagttatcgactgaacgaagccgattttcgtggtgaacgctttgccgactggccatgcgacctcaaaggcaacaacgacctgctggtactcagtaaaccggaagtgatcgccgctatccacaacgcctactttgaagcgggcgcggatatcatcgaaaccaacaccttcaactccacgaccattgcgatggcggattaccagatggaatccctgagcgcggaaatcaactttgcggcggcgaaactggcgcgagcttgtgctgacgagtggaccgcgcgcacgccagagaaaccgcgctacgttgccggtgttctcggcccgaccaaccgcacggcgtctatttctccggacgtcaacgatccggcatttcgtaatatcacttttgacgggctggtggcggcttatcgagagtccaccaaagcgctggtggaaggtggcgcggatctgatcctgattgaaaccgttttcgacacccttaacgccaaagcggcggtatttgcggtgaaaacggagtttgaagcgctgggcgttgagctgccgattatgatctccggcaccatcaccgacgcctccgggcgcacgctctccgggcagaccaccgaagcattttacaacagtttgcgccacgccgaagctctgacctttggcctgaactgtgcgctggggcccgatgaactgcgccagtacgtgcaggagctgagtcggattgcggaatgctacgtcaccgcgcacccgaacgccgggctacccaacgcctttggtgagtacgatctcgacgccgacacgatggcaaaacagatacgtgaatgggcgcaagcgggttttctcaatatcgtcggcggctgctgtggcaccacgccacaacatattgcagcgatgagtcgtgcagtagaaggattagcgccgcgcaaactgccggaaattcccgtagcctgccgtttgtccggcctggagccgctgaacattggcgaagatagcctgtttgtgaacgtgggtgaacgcaccaacgtcaccggttccgctaagttcaagcgcctgatcaaagaagagaaatacagcgaggcgctggatgtcgcgcgtcaacaggtggaaaacggcgcgcagattatcgatatcaacatggatgaagggatgctcgatgccgaagcggcgatggtgcgttttctcaatctgattgccggtgaaccggatatcgctcgcgtgccgattatgatcgactccagtaaatgggacgtcattgaaaaaggtctgaagtgtatccagggcaaaggcattgttaactctatcagcatgaaagagggcgtcgatgcctttatccatcacgcgaaattgttgcgtcgctacggtgcggcagtggtggtaatggcctttgacgaacagggacaggccgatactcgcgcacggaaaatcgagatttgccgtcgggcgtacaaaatcctcaccgaagaggttggcttcccgccagaagatatcatcttcgacccaaacatcttcgcggtcgcaactggcattgaagagcacaacaactacgcgcaggactttatcggcgcgtgtgaagacatcaaacgcgaactgccgcacgcgctgatttccggcggcgtatctaacgtttctttcagcttccgtggcaacgatccggtgcgcgaagccattcacgcagtgttcctctactacgctattcgcaatggcatggatatggggatcgtcaacgccgggcaactggcgatttacgacgacctacccgctgaactgcgcgacgcggtggaagatgtgattcttaatcgtcgcgacgatggcaccgagcgtttactggagcttgccgagaaatatcgcggcagcaaaaccgacgacaccgccaacgcccagcaggcggagtggcgcagctgggaagtgaataaacgtctggaatacagcctggtcaaaggcattaccgagtttatcgagcaggataccgaagaagcccgccagcaggctacgcgcccgattgaagtgattgaaggcccgttgatggacggcatgaatgtggtcggcgacctgtttggcgaagggaaaatgttcctgccacaggtggtcaaaagcgcgcgcgtcatgaaacaggcggtggcctacctcgaaccgtttattgaagccagcaaagagcagggcaaaaccaacggcaagatggtgatcgccaccgtgaagggcgacgtccacgacatcggtaaaaatatcgttggtgtggtgctgcaatgtaacaactacgaaattgtcgatctcggcgttatggtgcctgcggaaaaaattctccgtaccgctaaagaagtgaatgctgatctgattggccttagcgggcttatcacgccgagcctggacgagatggttaacgtggcgaaagagatggagcgtcagggcttcactattccgttactgattggcggcgcgacgaccagtaaagcgcacacggcggtgaaaatcgagcagaactacagcggcccgacggtgtatgtgcagaatgccagccgtaccgttggtgtggtggcggcgctgctttccgatacccagcgcgatgattttgtcgctcgtacccgcaaggagtacgaaaccgtacgtattcagcacgggcgcaagaaaccgcgcacaccaccggtcacgctggaagcggcgcgcgataacgatttcgcttttgactggcaggcttacacgccgccggtggcgcaccgtctcggcgtgcaggaagtcgaagccagcatcgaaacgctgcgtaattacatcgactggacaccgttctttatgacctggagcctggccgggaagtatccgcgcattctggaagatgaagtggtgggcgttgaggcgcagcggctgtttaaagacgccaacgacatgctggataaattaagcgccgagaaaacgctgaatccgcgtggcgtggtgggcctgttcccggcaaaccgtgtgggcgatgacattgaaatctaccgtgacgaaacgcgtacccatgtgatcaacgtcagccaccatctgcgtcaacagaccgaaaaaacaggcttcgctaactactgtctcgctgacttcgttgcgccgaagctttctggtaaagcagattacatcggcgcatttgccgtgactggcgggctggaagaggacgcactggctgatgcctttgaagcgcagcacgatgattacaacaaaatcatggtgaaagcgcttgccgaccgtttagccgaagcctttgcggagtatctccatgagcgtgtgcgtaaagtctactggggctatgcgccgaacgagaacctcagcaacgaagagctgatccgcgaaaactaccagggcatccgtccggcaccgggctatccggcctgcccggaacatacggaaaaagccaccatctgggagctgctggaagtggaaaaacacactggcatgaaactcacagaatctttcgccatgtggcccggtgcaagcgttagcggttggtacttcagccacccggacagcaagtactacgctgtagcacaaattcagcgcgatcaggttgaagattatgcccgccgtaaaggtatgagcgttaccgaagttgagcgctggctggcaccgaatctggggtatgacgcggactgattcacaaatctgtcacttttccttacaacaaacagggcgctcaatgagtgccctgtctctttattaatatgaaacacttatactggaaacaggctggaataatcttagccggaaaaacgaatgtcaaaaggcacagtaaagatgccagtcagcgtgtttccggtcctttggtcattcaattgcttcaggaacatataacgataaggagaacctgaactcgtgttaacgctgcttcacctgctttctgccgtcgccctgctggtctgggggactcatattgttcgaaccggcgtaatgcgcgtcttcggcgcgcgtttgcgtactgtccttagccggagcgtcgaaaaaaagccgctcgccttttgcgcggggatcggcgttaccgcactggtacagagcagtaatgccaccaccatgctggtgaccagctttgtcgctcaggatctggtagccctcgcaccggctctggtcattgtgctgggtgcagatgtcgggacggcgctaatggcgcgtattctcaccttcgacttatcctggctgagtccgttacttatttttatcggcgtgatttttttcctcggacgcaaacagagtcgcgccgggcaactgggccgcgtcggtattggtcttgggctgattttgctagcgctggagttgattgtgcaggccgtaacgccgatcacccaggcaaacggcgttcaggtgatctttgccagcctgaccggcgatattctgctggatgcgctgattggcgcgatgttcgccattatcagctactccagccttgctgctgtactgctgaccgcgactctgaccgccgcaggcattatctccttccccgtggcgctctgtctggtgattggtgctaacctcggttccggtctgctggcaatgctcaacaacagtgccgccaatgccgcagcccgccgtgtcgcgctgggtagtctgctgtttaagctggtgggtagcctgattatcctgccgtttgtccatttgctggcagagacaatggggaagttgagtttgccaaaagcggaactggtgatctatttccacgtcttctacaaccttgtacgttgcctggtcatgctgccatttgttgacccgatggcacggttttgcaaaacgattattcgcgatgaaccggaactggatacccagctacggcctaaacatctggatgtcagcgcgctggatacgcccacgcttgctctggcgaacgccgcgcgcgaaaccctgcgcattggcgacgccatggaacagatgatggaagggttgaataaagtgatgcacggtgagccacggcaggagaaagagctgcgtaagctggcagatgatatcaacgttctctacaccgccattaagctgtatctggcgcggatgccaaaagaagagctggcggaggaagagagccgccgctgggcagagatcatcgaaatgagcctcaaccttgaacaggcctccgatatcgtcgagcgcatgggcagcgaaattgctgacaaaagtctggcagcacggcgggcatttagccttgatgggttgaaggaactggatgcgctctatgagcaattgctcagtaatttaaagctggcaatgagcgtgttcttctctggcgatgtcaccagcgctcgtcgtttgcgtcgcagcaaacatcgttttcgcattcttaatcgccgctattcccacgcccacgtcgatcgcctgcatcagcaaaacgtgcagagcattgaaaccagtagcctacatttaggcttactgggagatatgcagcgcctgaacagcctgttttgtagcgtggcttacagtgtgctggaacagccggatgaagatgaaggacgggacgagtattaatattgtgaatcctgtaggcctgataagacgcgtcaagcgtcgcatcaggcactatgaacaagatgccggatcatgcatccggcaattcacttaaaaacggtgaccagcttccagcggaaccgcttcttcaccagccttaaacacataagtggtgttcgggccacccagcgtagcgtgacctttactcactgtgatccagttaccttccggtagaccaataatcgtcagttctggcgcgacgaccagcagttcgcgaatacgctgctcacgggtttcacctttatggccttccggcagcgcgttggtgaagtgcgggttgatttgcagcgggaacagatttagcgcatcgaaaccttgcggatcgacaatcggcatatcgttggtggtacgaatagttgggcaagcaaggttagcgcctgcgctccagccaatatacagagcgccacgtttaaccacgtcagtaattggtgccagcagcccgcgctcgcggcactgtttcagcaactggaaagtattcccgccgccgacaatcacgatctcagcattttcaatcgcggcaacgggatcgacaacgctatgaataccggtgacagaaacacccagcggagcgagaaccgcagccgttttcgctgtgtaatcatcccaggtctgcgttacgccagcgaaagggataaacaccgcactgcggcgaccctgcaactgttcagcaattagcggcagtgcatgttccagccaggctttacccggcagcgtgctgttactcaataaaagcagttccattacttctccggttagtaagaaatcacgggaggcatgctaccactgcgaatttaaccacttactgacatggctcacgatgtcgcacattgcttctggaaagtgatttgagcaggtaacgaattcaagccaatggaaataacaaatagttcgctcatgactattttttatcaacccaaaggtacggtatattccgttttttacaggagaatttatgctgcccgacagtagtgtccgtttaaataaatacatcagcgaaagcggaatttgcagtcgccgcgaagcggatcgctatatcgagcaaggcaatgtgttccttaatggcaagcgagccaccattggcgatcaggtgaaacccggcgacgttgtgaaagtaaacggtcagttgattgaacctcgggaagccgaagatttggtacttatcgccctgaacaagcccgttggtattgtaagcaccaccgaagatggcgagcgcgataacattgtcgatttcgttaaccacagcaaacgcgtgttcccgattggccgcctggataaagactcccaggggctgattttcctcaccaatcacggcgatctggtgaataagatcctgcgtgctggcaatgatcatgagaaagagtatctggtgacggtcgataaaccgattaccgaggagtttattcgcggcatgagtgcgggggtgccaatcctcgggacagtgaccaaaaagtgcaaagttaaaaaagaagcgccgtttgtcttccgcattaccctggtgcaggggctgaaccgtcagatccggcgcatgtgcgagcatttcggctatgaagtgaaaaagctggaacgcacgcgcatcatgaacgttagcttaagcggcattccgctgggggaatggcgcgatttaaccgacgatgagttaatcgacctctttaagctcattgaaaattcctcttccgaggtaaaacctaaagcgaaggccaaaccgaaaacagcgggcatcaaacgtccagtcgttaagatggaaaaaacggcggaaaaaggcggtcgcccggcgtccaacggtaagcgttttaccagcccggggcgtaaaaagaaggggcgctgattaacgcctcagactgatgaaaacggcccaaaagtgcccggacagtcccctcgccccttcgggaaaagggttagggtgaggggaaaattgtgttcacactgacgagtgaaaatctcaggcgttgattgtggattagcgcctgccgcgcgtgctcgtatttgcactccagctaaaactcgcttcaggatccggtttataagcctgctttttcttcaactggcgggcttttttcgcttcagcctcacgctcaaccattaatttatcgatgtaatctttcttaatgctgttggtttcggagttggtcaatacgcgaccatgcgcaatccgcgcccgatccagcagtgttttaagttcacgctgctcgcgttcagtcatctctttttgggtaatacgggggagtgccatgatggtgccctcagtgagccagagagttcagtgtacgggaattcgtttgcgagcagaactgataatattcattttgccttctcttaactatttatctctttcgataattaattagagatgcagataaaaaaattaaaggcaattattctccgataaagacgctggttaacagagtacaggctcgtttattgatgagcatagtgacaagaaaatcaatacggcccgaaatatagcttccaggccatacagtatttactcaaacaaattactatgcagtttttgcaccacctgctcggcatcttcgccgggcaccaggaagcacaggttatggctggatgcgccataacaaatcatgcgaatgttgaacggttccagtacgccgaatacctctttgccaacgccgcaggctttactcaggtcattgccaatcaacgcgaccagcgccagaccttcttccacctccacccgacacagtgcggaaagctccatcagcagagattgcgtcagcaacgtatcgccagtggaggtactaccggtggtatcaagggttaatgccacgctcacttcactcgtggtgattaagtctacgctaatattatgccgcgcgaggatgccgaaaacttccgcgaggaaaccgcgagaatgcagcatattcaggctgtgcaaagtgagcagagtctgattgcgacgaagcgccagagcgcggaacagcggcggattttcagttttattgcacaccagcgtaccacctgcgcgtgggtctttgctggagccgacaaagaccgggatatcgctgcgtactgcgggtagcaacgttgccggatgcagtacttttgcaccaaaagttgccatctctgccgcttcggcaaacgcgatttcatcaatgcgttttgctgcggaaactacgcgtggatcggtggtgtagatgcccgggacgtcggtccagatatcaacacgagatgcgtgtaaagcctccgccagcaaggctgccgtataatcgctgcctccacggccaagcgtcgttgtacgacctttattttcgctaccgataaatccctgggtgatcactaagccttcattgagacgtgggagcagctgcagcgcggccagttccgccagcgcggctatatctggctctgcacgaccaaatcggtcgttggtacgcatcactttacgtacatcaaaccactgtgcctgaacatcgcgttcgcgcaggatctcaacaaacagcagggtgctcatcagctcgccgtggctgaccagctcatctgtcagcgccggagacgttgccagcgccgccgcttctgccagaacagtaatgttctccagcagacgttcaatctcttcacggataacgttcgggtaacgcagacgttccagaatggcaaactggatgttgcggatagcgtcgagtttttcgaatcgctcgccaggttccagtccttcagctaaagcgaccagcagattagtgataccagcagaagcgctgaggacaactaaacgcacgttggcatcagaaagcacaatatcagcgctgcggttcatggcgtcaaaatcagctacgctggtaccgccaaatttggagacaacaatttcagacataactacctcgtgtcaggggatccattttcagccttggcacaagggaagagcggaagacgggtgggcgcagagcgatacttcgctactattttcacccagaagtgctccaccacttgcgaaacgcccgactgcgaacgcttctggtgacaacccaggggattcagcccctgtagccgatgatgaacgtggccagccgttcaatcacctcggcgatgcaccccctcaggtgttatcacaggactggctcctccaacaccgttacttgggcaacgcgcctcttctggcctgcgctagcgcaggtagtacatttataaataaagggtgagcggggcggttgtcaacgatggggtcatgcggatttttcatccactcctggcggtcagtagttcagctaataaatgcttcactgcgctaagggtttacactcaacattacgctaacggcactaaaaccatcacatttttctgtgactggcgctacaatcttccaaagtcacaattctcaaaatcagaagagtattgctaatgaaaaacatcaatccaacgcagaccgctgcctggcaggcactacagaaacacttcgatgaaatgaaagacgttacgatcgccgatctttttgctaaagacggcgatcgtttttctaagttctccgcaaccttcgacgatcagatgctggtggattactccaaaaaccgcatcactgaagagacgctggcgaaattacaggatctggcgaaagagtgcgatctggcgggcgcgattaagagcatgttctctggcgagaagatcaaccgcactgaaaaccgcgccgtgctgcacgtagcgctgcgtaaccgtagcaataccccgattttggttgatggcaaagacgtaatgccggaagtcaacgcggtgctggagaagatgaaaaccttcagtgaagcgattatttccggtgagtggaaaggttataccggcaaagcaatcactgacgtagtgaacatcgggatcggcggttctgacctcggcccatacatggtgaccgaagctctgcgtccgtacaaaaaccacctgaacatgcactttgtttctaacgtcgatgggactcacatcgcggaagtgctgaaaaaagtaaacccggaaaccacgctgttcttggtagcatctaaaaccttcaccactcaggaaactatgaccaacgcccatagcgcgcgtgactggttcctgaaagcggcaggtgatgaaaaacacgttgcaaaacactttgcggcgctttccaccaatgccaaagccgttggcgagtttggtattgatactgccaacatgttcgagttctgggactgggttggcggccgttactctttgtggagtgcgattggcctgagcattgttctctccatcggctttgataacttcgttgaactgctttccggcgcacacgcgatggacaagcatttctccaccacgcctgccgagaaaaacctgcctgtactgctggcgctgattggcatctggtacaacaatttctttggtgcggaaactgaagcgattctgccgtatgaccagtatatgcaccgtttcgcggcgtacttccagcagggcaatatggagtccaacggtaagtatgttgaccgtaacggtaacgttgtggattaccagactggcccgattatctggggtgaaccaggcactaacggtcagcacgcgttctaccagctgatccaccagggaaccaaaatggtaccgtgcgatttcatcgctccggctatcacccataacccgctctctgatcatcaccagaaactgctgtctaacttcttcgcccagaccgaagcgctggcgtttggtaaatcccgcgaagtggttgagcaggaatatcgtgatcagggtaaagatccggcaacgcttgactacgtggtgccgttcaaagtattcgaaggtaaccgcccgaccaactccatcctgctgcgtgaaatcactccgttcagcctgggtgcgttgattgcgctgtatgagcacaaaatctttactcagggcgtgatcctgaacatcttcaccttcgaccagtggggcgtggaactgggtaaacagctggcgaaccgtattctgccagagctgaaagatgataaagaaatcagcagccacgatagcagcaccaatggtctgattaaccgctataaagcgtggcgcggttaatcatcgtcgatatgtaggccggataaggcgttcacgccgcatccggcaaccgatgcctgatgcgacgcggtcgcgtcttatcaggcctacaggtcgatgccgatatgtacatcgtattcggcaattaatacatagcacgattgattaaataaccttaataacaatgccgacgttatgtcggcatttttttatcagataaatccccttgtctgtaatttaacggaaatcataccgtgaggttaatcctaaaatagatttttaatcgttgtttatttcggaaaatacgcagattaattgcttttgtttttattttaagtttatgatttttattgttatttaaatataagttgaaacttatatttgatattcattccaattatcctaaaacgccatcgctaattccccgcgccgtaattcgcatgctttagttgtgtatactcgatcccgcccgaaatgtttttgggtaaatctccattcattcaatgaagggaaattgttatgaaaaaagttctgtatggcatttttgccatatctgcgcttgcggcgacttctgcgtgggctgcacctgtacaggtgggcgaagcggcagggagcgcagcaacgagcgttagcgcggggagttcctccgcgaccagcgtcagcaccgtaagcagcgcggtgggtgtcgcgcttgcggcaaccggtggcggtgatggttctaataccgggaccaccacaaccacgaccaccagtacccagtaataaagtatgtatccccaaaataattcgagtcattgcatctgtggctagaagtatgaagggattaaccataaccacactccggtgtggttattctgcccctctggagaagagtcgtgaagcgacctgcactcattcttatctgcctgttattacaggcctgtagtgccacgactaaagagctgggcaatagtctgtgggacagtctgttcggcacgccaggcgtacagctgacggatgatgatattcaaaatatgccctacgccagccagtacatgcagcttaatggcgggccgcagttatttgtggtgctggccttcgctgaagacggacaacaaaaatgggtcactcaggatcaggctactctcgttacccaacatggccgtctggtgaagactctgctcggcggcgacaacctgattgaagtgaataaccttgctgccgacccgctgattaaacccgcacaaatcgttgatggcgcaagctggacgcgcacgatgggctggaccgagtaccagcaggtacgctacgccaccgcacgcagtgtcttcaaatgggatggcaccgataccgtcaaagtcggcagcgatgaaaccccggttcgcgtgctggacgaagaagtctccaccgaccaggcgcgctggcataaccgctattggatcgacagcgaagggcaaattcgccagagcgaacagtatctcggcgcggattattttccggtgaaaaccactctcatcaaggcggcaaaacaatgattaaacaaactattgtcgcgttgcttttgagtgtgggagcgagtagcgtcttcgcggcaggaaccgtcaaggtgttcagcaatggcagcagtgaggccaaaacgctaacgggcgcagagcatttaatcgatctggtaggccaaccgcggctggcaaacagctggtggcccggtgcggtgattagcgaagagctggcaacggcggcagcattgcgtcagcagcaggcgttgctgacacggctggcagaacagggcgcagattccagcgccgacgatgccgctgcgattaacgccttacgccagcaaattcaggcgttgaaagtgacgggcaggcaaaaaatcaatcttgatcccgatatcgtccgcgttgccgaacgcggtaacccgccgttgcagggcaactacacgctgtgggtcggaccaccgccgtccacggtcacgttgttcgggcttatcagccgtcctggcaagcagccattcactccaggtcgcgacgtggcgagctatctctctgaccagagcctgctcagcggtgcggatcgcagctacgcgtgggtggtttacccggacggacgcacgcaaaaagcgccggtggcttactggaacaagcgtcacgtagagccgatgcccggcagcattatttatgttggcctcgcggactccgtctggagtgagacgcctgatgcccttaacgccgacattcttcagactctgacgcagcggatacctcaataatgaaaaaaagacatctgcttagcttactggcgctgggcattagcacagcttgctacggcgaaacatatcctgcgcccattggtccgagccagagcgatttcggtggcgtaggattattacaaacgcccaccgcgcgtatggcacgggaaggggagttgagtctgaactatcgcgataacgatcagtaccgttattacagtgctagtgtgcaactcttcccgtggctggaaacaacgctgcgctacaccgacgtgcgcacccggcagtacagcagcgtcgaagcgttctctggcgatcaaacgtataaagataaagccttcgatctcaaactgcgtttgtgggaagagagttactggctgccgcaagtggcggttggtgcgcgggatatcggcggtacggggctgtttgatgcggaatatcttgttgccagcaaagcctgggggccgttcgattttacgctcggcctgggctgggggtatttgggcaccagcggtaatgtgaaaaatccgctctgtagtgccagtgataaatattgctatcgcgataacagctacaaacaggcgggatctatcgacggtagccagatgttccacggtcctgccagtctgtttggcggcgtggaataccagacgccctggcaaccgctgcgcctgaaactggagtatgaaggcaataattatcagcaggattttgccgggaagctggagcaaaaaagtaagtttaacgtcggtgcgatttatcgcgttaccgattgggccgacgttaaccttagctatgaacgtggcaacacctttatgtttggcgttacgttgcgcaccaactttaacgatctgcgcccgtcttacaacgataacgcccgcccgcaatatcaaccgcagccgcaggatgccattttgcagcatagcgtggtggcgaatcagttaacgctgttgaaatacaatgccggacttgccgatccacagatccaggcgaaaggcgatacgctgtatgttaccggcgagcaggtgaaatatcgtgatagccgcgaagggatcatccgtgcgaatcggatcgtgatgaacgatctgccggatgggatcaaaacgatccgcattacggaaaatcgccttaacatgccgcaggtgacgacggaaaccgatgtcgccagcctgaaaaatcatctcgccggagagccgttgggccacgaaacgacgctggcgcaaaaacgcgtcgagccagtggttccgcagtccaccgagcagggctggtatatcgacaaaagtcgctttgatttccatatcgatccggtgctgaaccagagcgtcggtggcccggaaaacttttacatgtatcagctgggcgtgatgggaacggcagatttgtggctgacggaccatctgctgaccaccggcagcctgtttgcaaatcttgccaacaactacgacaagtttaactacactaatcctccgcaggacagccacttaccgcgcgtgcgtacccatgtgcgcgagtatgtgcagaacgatgtctatgtgaataacctgcaagccaactacttccagcatctgggcaacggcttctacggtcaggtctacggtggttatctcgaaaccatgtttggcggtgcgggggcagaagtgttgtatcgcccgctggacagcaactgggcgtttggtctggatgccaactacgttaaacagcgcgactggcgtagtgcaaaagatatgatgaaattcaccgactacagcgtgaaaaccggacatctgaccgcctactggacgccatctttcgctcaggatgtgttagttaaagccagcgtcgggcagtatctggcaggggataaaggcggcacgctggagatcgccaaacgctttgatagcggcgtggtggtgggtggctatgccacgatcactaatgttagcaaagaggagtacggcgaaggggacttcaccaaaggcgtgtatgtcagcgtaccgttggatctcttcagctctggcccgacacgcagccgtgcggcgattggctggacgccgctgacgcgtgacggtggtcagcaacttgggcgtaagttccagttgtatgacatgaccagcgaccgtagcgtcaatttccgctaagtcatgggaaaggtgccagttttcgcactcactggcaccttcattcttaatggcctgtcgagccatcaggaacgcagttcactcccggtttgcgatctggtgtgtaaaggcgaaaacattctgtcttcctgtccgtcgatatcggttgcaggtctggttgcctgagcgactgggccatcattgggctggagacattgctttgcggtaggtcggctttatcagcagtaccgagcggaccagcataagcaggaagaacagagactgataacatcaaagcagcaaaataaggcttcatttttaccacctttatcaggttacgtttcatttgttccagaggaacattgtcgatttttcgcgcattgctggtggctgggaatcacctgaatgggtgatttttgaattaccggctttggtgcggtttgtcttgccggatgcgccgccaggcgcggcttatccggcctacgggtaggtatatccggctttggtggaggcgcgctccaaatccaggttgaacaaaacatacacaaaaaatatagatctccgtcacatttttgcgttatacaggaagctcgccactgtgaaggaggtactgctatgacgagtctctctcgtccgcgcgtggagtttatctccaccattttgcagaccgtactcaatcttggcctgctgtgcctcggcctgattttggttgtcttcctcggcaaagaaacggtgcatctggctgatgtgctgttcgcgccagaacaaaccagcaaatatgagctggtagaaggactggtggtttactttctctatttcgaatttatcgcgctgattgtgaagtactttcagtccggttttcacttcccgctacgttactttgtctatattgggatcaccgccattgtgcgcttgatcatcgtcgatcataaaagcccactggatgtgttgatctacagcgctgcgatcctgttactggtgatcaccctgtggctgtgtaatagcaaacggctgaagcgggagtaaaaagtcagcacgccgaaatggcgcggcgtgctggacaggaagattacagcgtagcagtttgttgtgttttcttcgtttccggttcccagagcgcttccagctcctcaagggttttacctttggtttccgggacaaatttccacataaacagtgctgccagaacgcccatacaaccgtaaatccagtaggagaaaccgttgtggaaatgggccaccagccaggagtttttgtccatcatcgggaaggtccaggagacgaagtagttcgccagccactgggccgccaccgcgattgccagcgctttaccacgaatagcattcgggaagatttcgctcagcagtacccagcataccggaccccaggacatggcaaaggcggcaacatagaacagcatgctcagtagcgccacaatacccggtgcctgagtgtaaaacgcggtaccgaggctaaacataccgattgccattccgagtgcgccgataatttgcagtggcttacgaccaaatttatccaccgtcataattgccagaacggtgaaggtgaggttgataactccgacaataatggtctgcaacagcgcgatatccgtgctggcccccagcgttttgaacacttccggcgcgtagtacagcaccacattgatgccgacaaattgctggaagatggagagcattacgccgattacaatcacgcccacgccaaacatcagcagacgaccaccggttttgcggccatgatccagggagtgtttaatttcctgtactgcctgagttgcaagcgtgttgcccataattttgcgcaggataccttccgcctgttcttgcttgccgcggctcatcagccagcgaggactttctggcacggtatacagcagcattaagaacagcagtgcagggatacattcgctggcaaacatataacgccagccgtcagtattcagccagctggcatcaccggaacgggcaataaaatagtttacgcagtaaactaaaagttgcccgaaaataatcgcaaactggttaaaagagaccagtttcccgcgaatatgagctggagccagttccgcaatatacattgggctgagcatactggctaaaccaacgccaataccgccaataatgcgataaataacaaattccgggacataacctgccagataaacaggcacagtgttgtccgggtttatagaggtaaaaccaagttctggccaggcagaacctacaccagaaataaaaaacaggacagcagcaatcttaagactatcacgacgaccgaagcggttactgcaataaccaccgagggcaccgccgatgatgcaaccaatcagagcgctggccacgcaaaaccctaacagggagttggcagcggattcacttaagttttgtggagcaacaaagacggtattgagactctcaacagtaccggaaataacggcggtgtcgtagccaaataataaaccacctaatgtagcgactaaggtaatgctaaatatataactggaattatactgggtattcattcagacctgccttagaccattctgatcttttatcagtgcattgatgttggaattgtcaggcagttaaggcaattatcattttttacaatgcgtttacgtaatgtcttttctgtgatcttaattgtgataattatccaaaattgataaaaacaatactattgccgtgactcagagcacgaaagagaattatcgtaagtgggaaaacaaataacgtaaaaataataagctctatgatggaaatattaaccggcgaacgattcagattgcagacgaaagaaaaaaaggcgctccgtggagcgccgaataacagtcacaagttgggataacgtaagttgagggtgcagcggcataacattggcagaacaacatctttaacctttcacaccacctgccgtcaggccgttgaccagccagcgttgagccagcaagaagacgatggtgatcggtaatgcagacatcacggcagcggcggcaaagtcaccccacaggtagttttgcgggttgaggtattgctgcatccccacggccagggtgtagctgtttacgtcacgcagtaacaggctcgcgaccggaacttcagtaatggcagcgataaagctcaggatgaataccaccgccagaatcggtacactcagcggcaacaggacaaggcggaaggcctgccacggtgtcgcaccatccagcgcagcagcttcttccaggctactgtcgatggtttcgaaatagcctttgatggtccagacatgcagcgcaatcccacccagatacgcgaaaattacgccgccgtgagtattcaggccaatgaatggaatgtactcacccagacgatcaaacaacgcatacaacgcgaccagactaagtactgccgggaacatctggaaaatcagcattcctttcagcagcgtcgctttgcctggaaagcgcatacgggcgaaagcgtaggcgcaggtggtggagagcgccacaatgccaatcgcggaaatcccggcgacctttacgctgttccacagccacagcagtaccgggaatggcggtggcgtaatgcgaccatcagcctgttcaacgctaaaacctaacgccagtttccagtgatcccaggagatttgctccgggatcaggctgccggtcgcaaagtttccctgacgcaggctgatagcgacgaccatcagcagcgggaacataatcgctgcgataaaaagtagcagtagcaggtgagtaataaataaacgagctttttggcttttcggttggaccattgccatttttgttatctcccttaatcaaacttcattcgcgtggctttcaggttcactatcgccagcgcacccaccagcaggaagatcagcgtggcaattgctgccgccagaccgaagtcctgacccccgccgccttcaaaagcgatgcggtaggtgtagttaacaagcaggtcggtataaccggctggcgtggtcgtgccaagacgatccgggccgccgttggttaacagttgaatcagcacgaagttgttaaagttaaaggcgaagctggcgatcatcagcggcgtcagcggtttaatcagcagcggcagcgtaatcttaaagaagttctggaacggacctgcgccatccattgcactggcttcatacaaatcgtccggaatcgctttcagcaagcccatgcagaggatcatcatgtacggataacccagccaggtattgacgataattagcatcgtgcgggcggtggtcggatcgctgaaccaggcgggcttcacgccaaacagcgcgctcaacatcatgttgatttcaccgaagctctggttaaacaaccctttgaaaatcaagatactaatgaagcttggcaccgcgtagggcagaatcagcaggacgcgatagaccgctttgccgcgcaacgcttcccactgcaccagacacgccagaaccatgccgaccgccaccgttaaaaagacagtgatcaggctgaacaccacggtccagacgaaaatggcgaggaacggtttctgaatgccttcgtcggtaaagacgcgggtaaagtttttccagccggtggtcacggtgtaaccggggcttagcttttcatcaccccagttgccgtcggcggtaatggactggtaaaagccaatttggttattcggacgatatttcacgccgctctgattattcgtcaacgtgccgtcaccgtcgagtgtgtagagcggctgcgtgccagaaaactggcgcagggagctcatcatcactttgttgccatccggcagaatggcggtaatgtcactcagcgcctgacgattctgggtaatcacgcgcagattcgcgcgttcgccttcgggctgggcggtcgtttctttcagttgcagtttttgctcgccgccaaatttaaaagcgtcggagaggtaatttttgccggtttcgccgtcgctgagcgccagttgccactcatcgcccgccgggtaaagaccaaagttataggttttgcctgcttgccaggagcgatctaacaacacttcctgcgcacgttcaaaagtcagctggttagtgctgctgtagttggtgaaggcaatggcgatggtgcagaccagagggaagaggacgaataatcccattccagccattcccgggtaaacatagcgccaggcgtaggctttacgattggcgaaaatatacagccccgcactactcaatatcagcgtggtaatggcgaacaggtattccccttgtgcgtacattaaaacaacaaggtaacccaccagcaggccgagcagacctagcacactccatttcagcgcgtcgctttgccaccaatgtttctttttaatgacatccatggggttcttcctcattccaggacggataaggctttcacgccttatccgacaacaactgcctgatgcgacgctgacgcgtcttatcaggcctacatacgtttcggttttgtaggccggacaaggcgttcacgccgcatccggcatttcacagcattacttggtgatacgagtctgcgcgtctttcagggcttcatcgacagtctgacgaccgctggcggcgttgatcaccgcagtacgcacggcataccagaaagcggacatctgcgggatgttcggcatgatttcacctttctgggcgttttccatggtggcggcaatacgtggatctttcgccaactcttcctcgtaagacttcagcgctacggcacccagcggtttgtctttattaaccgcttccagaccttcatcagtcagcagatagttttcgaggaactctttcgccagctctttgttcggactggcggcgttaatacctgcgctcagcacgccaacgaacggtttggatggttgacccttgaaggtcggcagtaccgttacaccataattcactttgctggtgtcgatgttggaccatgcccacgggccgttgatggtcatcgctgtttcgcctttattaaaggcagcttctgcgatggagtaatcggtgtctgcattcatgtgtttgtttttaatcaggtcaaccaggaaggtcagacccgctttcgcgccagcgttatccacgcccacgtctttaatgtcgtacttgccgttttcatacttgaacgcataacccccgtcagcagcaatcagcggccaggtgaagtacggttcttgcaggttgaacatcagcgcgctcttacctttcgctttcagttctttatccagcgccgggatctcttcccaggtttttggcgggttcggcagcagatctttgttataaatcaggcttaacgcttcaacagcgatcgggtaagcaatcagcttgccgttgtaacgtacggcatcccaggtaaacggatacagcttgtcctggaacgctttgtccggggtgatttcagccaacaggccagattgagcgtagccaccaaagcggtcgtgtgcccagaagataatgtcagggccatcgccagttgccgcaacctgtgggaatttctcttccagtttatccggatgctcaacggtgactttaattccggtatctttctcgaatttcttaccgacttcagcgagaccgttatagcctttatcgccgttaatccagattaccagtttaccttcttcgattttggcgagagcgctggcggaaaacatcatcgtcgttaatgcggataatgcgaggatgcgtgcacctgtttttattttcataatctatggtccttgttggtgaagtgctcgtgaaaacacctaaacggactctagtttctttatacggcaacctctttccatcctccttgcccctacgccccaccgtcgctttgtgtgatctctgttacagaattggcggtaatgtggagatgcgcacataaaatcgccacgatttttgcaagcaacatcacgaaattccttacatgacctcggtttagttcacagaagccgtgttctcatcctcccgcttcctcccccataaaaaagccagggggtggaggatttaagccatctcctgatgacgcatagtcagcccatcatgaatgttgctgtcgatgacaggttgttacaaagggagaagggcatggcgagcgtacagctgcaaaatgtaacgaaagcctggggcgaggtcgtggtaagcaaagatatcaatctcgatatccatgaaggtgaattcgtggtgtttgtcggaccgtctggctgcggtaaaagcactttactgcgcatgattgccgggcttgagacgatcaccagcggcgacctgttcatcggtgagaaacggatgaatgacactccgccagcagaacgcggcgttggtatggtgtttcagtcttacgcgctctatccccacctgagtgtagcagaaaacatgagttttggcctgaaactggctggcgcaaaaaaagaggtgattaaccaacgcgttaaccaggtggcggaagtgctacaactggcgcatttgctggatcgcaaaccgaaagcgctctccggtggtcagcgtcagcgtgtggcgattggccgtacgctggtggccgagccaagcgtatttttgctcgatgaaccgctctccaacctcgatgctgcactgcgtgtgcaaatgcgtatcgaaatctcccgtctgcataaacgcctgggccgcacaatgatttacgtcacccacgatcaggtcgaagcgatgacgctggccgacaaaatcgtggtgctggacgccggtcgcgtggcgcaggttgggaaaccgctggagctgtaccactatccggcagaccgttttgtcgccggatttatcggtagcccaaagatgaacttcctgccggtaaaagtgaccgccaccgcaatcgatcaagtgcaggtggagctgccgatgccaaatcgtcagcaagtctggctgccagttgaaagccgtgatgtccaggttggagccaatatgagcctgggtattcgcccggaacatctactgccgagtgatatcgctgacgtcatccttgagggtgaagttcaggtcgtcgagcaactcggcaacgaaactcaaatccatatccagatcccttccattcgtcaaaacctggtgtaccgccagaacgacgtggtgttggtagaagaaggtgccacattcgctatcggcctgccgccagagcgttgccatctgttccgtgaggatggcactgcatgtcgtcgactgcataaggagccgggcgtttaagcaccccacaaaacacacaaagcctgtcacaggtgatgtgaaaaaagaaaagcaatgactcaggagatagaatgatgattactctgcgcaaacttcctctggcggttgccgtcgcagcgggcgtaatgtctgctcaggcaatggctgttgatttccacggctatgcacgttccggtattggttggacaggtagcggcggtgaacaacagtgtttccagactaccggtgctcaaagtaaataccgtcttggcaacgaatgtgaaacttatgctgaattaaaattgggtcaggaagtgtggaaagagggcgataagagcttctatttcgacactaacgtggcctattccgtcgcacaacagaatgactgggaagctaccgatccggccttccgtgaagcaaacgtgcagggtaaaaacctgatcgaatggctgccaggctccaccatctgggcaggtaagcgcttctaccaacgtcatgacgttcatatgatcgacttctactactgggatatttctggtcctggtgccggtctggaaaacatcgatgttggcttcggtaaactctctctggcagcaacccgctcctctgaagctggtggttcttcctctttcgccagcaacaatatttatgactataccaacgaaaccgcgaacgacgttttcgatgtgcgtttagcgcagatggaaatcaacccgggcggcacattagaactgggtgtcgactacggtcgtgccaacttgcgtgataactatcgtctggttgatggcgcaagcaaagacggctggttattcactgctgaacatactcagagtgtcctgaagggctttaacaagtttgttgttcagtacgctactgacagcatgaccagccagggtaaagggctgagccagggttctggcgttgcatttgataacgaaaaatttgcctacaatatcaacaacaacggtcacatgctgcgtatcctcgaccacggtgcgatctccatgggcgacaactgggacatgatgtacgtgggtatgtaccaggatatcaactgggataacgacaacggcaccaagtggtggaccgtcggtattcgcccgatgtacaagtggacgccaatcatgagcaccgtgatggaaatcggctacgacaacgtcgaatcccagcgcaccggcgacaagaacaatcagtacaaaattaccctcgcacaacaatggcaggctggcgacagcatctggagtcgcccggctattcgtgtcttcgcaacctacgccaagtgggatgagaaatggggttacgactacaccggtaacgctgataacaacgcgaacttcggcaaagccgttcctgctgatttcaacggcggcagcttcggtcgtggcgacagcgacgagtggaccttcggtgcccagatggaaatctggtggtaatagcaaaacctgggccggataaggcgtttacgccgcattcggcaaccaacgcctgatgcgacgcttgcgcgtcttatcaggcctacaacggctgtcaaatgtaggccggataaggcgtttacgccgcatccggcataaaaacaggttgtcattatctgaaaggggcgaaagcccctctgattatcgggtttagcgcgctattgcctggctaccgctgagctccagattttgaggtgaaaacaatgaaaatgaataaaagtctcatcgtcctctgtttaagtgcagggttactggcaagcgcgcctggaattagccttgccgatgttaactacgtaccgcaaaacaccagcgacgcgccagccattccatctgctgcgctgcaacaactcacctggacaccggtcgatcaatctaaaacccagaccacccaactggcgaccggcggccaacaactgaacgttcccggcatcagtggtccggttgctgcgtacagcgtcccggcaaacattggcgaactgaccctgacgctgaccagcgaagtgaacaaacaaaccagcgtttttgcgccgaacgtgctgattcttgatcagaacatgaccccaagtgccttcttccccagcagttatttcacctaccaggaaccaggcgtgatgagtgcagatcggctggaaggcgttatgcgcctgacaccggcgttggggcagcaaaaactttatgttctggtctttaccacggaaaaagatctccagcagacgacccaactgctcgacccggctaaagcctatgccaagggcgtcggtaacagcatcccggatatccccgatccggttgctcgtcataccaccgatggcttactgaaactgaaagtgaaaacgaactccagctccagcgtgttggtaggacctttatttggttcttccgctccagctccggttacggtaggtaacacggcggcaccagctgtggctgcacccgctccggcaccggtgaagaaaagcgagccgatgctcaacgacacggaaagttattttaataccgcgatcaaaaacgctgtcgcgaaaggtgatgttgataaggcgttaaaactgcttgatgaagctgaacgcctgggaagcacatctgcccgttccacctttatcagcagtgtaaaaggcaaggggtaattacgccccacagtgctgattttgcaacaactggtgcgtctcctggcgcacctttttttatgcttccttcctgggatatgagcgattttttatagtaactcacttcttcttcactaagaatatccattatctcaatgccttatcagagattcttttcctttcgccggtagtgtctggacattcaggctacttttccaggttattttatttctgttatgcagaggttttatgataagtcatatcctaaattctggcggcaataactctttgatgaaacatgatgtggtgcaaggaaataatatagtagatcttgatttactacgtaatttaaatggggtgccaggtttaaacagagataactttatttatatcagcaatattttttcaaatataaaacaacggaacgaaaaaatcatgcaataaatatgtttcgtgaagtctcaatcagtaatgatactataagtgtaaaattctacagaaatgaaaaaaattgaatgcgcttgcaattttctgatggataaagatgcgcaggggtatatcgacctgtctgatttggatttaacaagttgtcattttaaaggtgacgttataagcaaggtgtcttttttaagtagtaatctacaacatgtaacattcgaatgtaaagaaattggggattgcaattttactactgcaatagttgataatgtcatatttagatgtcgacgtttacacaatgtgatttttatcaaagcgagtggtgaatgtgtcgatttcagcaaaaatattcttgatacagttgacttcagccagagtcaacttggtcatagtaattttcgcgaatgtcagattagaaatagtaacttcgataattgttatctttacgctagccacttcaccagagcagagtttctgtctgccaaagaaataagttttattaaaagcaatttgacagctgttatgtttgattatgtgcgaatgagcacagggaattttaaagattgcattacagaacaattggaattaactattgattatagtgatatattttggaatgaagatctcgatggttatatcaataacattataaaaatgattgatacattgccagataatgcaatgatattgaaatccgttctggccgtaaaactggtgatgcaattaaaaatacttaatattgttaataaaaactttattgagaatatgaagaaaatatttagccattgtccttatataaaagatcccattatacgcagttatatccattctgatgaagataacaagttcgatgattttatgcgtcaacatcgattcagtgaggtgaatttcgatacccaacagatgatcgattttattaacagatttaatacgaataaatggctaattgataaaaataacaatttttttatccaacttatcgatcaggccttacgaagtacggatgatatgatcaaagcaaatgtttggcatctttataaagagtggattcgtagtgatgatgttagtcctatatttatagaaactgaagataatttaagaacctttaacacgaatgaattaacacgaaacgataatatctttatcctgttctccagtgtcgatgatgggccagttatggtggtaagctcccagcgcttacatgatatgttgaatcctacaaaagataccaattggaattccacgtatatctacaaatccagacatgagatgttgcctgttaatcttactcaggaaacacttttcagctccaaatctcatggtaaatatgcgcttttccccatttttactgcgagttggcgagctcatcgtataatgaataagggtgtttaagtaaaggaaaacatcaccgttcctggcatcctggacggtgatgcccctacggttgccctcgccagcacgggcatcggtaaagcgtaaggttcaacatcgttttaccacttcatgcgattgttgcgtttttgttgcgtattagatcacttaatttgctttacatctcccgtaaacacttttctgcgatacaatgcctttacgttatgtaacggagagttcggcatgagtcaccccgcgttaacgcaactgcgtgcgctgcgctattgtaaagagatccctgccctggatccgcaactgctcgactggctgttgctggaggattccatgacaaaacgttttgaacagcagggaaaaacggtaagcgtgacgatgatccgcgaagggtttgtcgagcagaatgaaatccccgaagaactgccgctgctgccgaaagagtctcgttactggttacgtgaaattttgttatgtgccgatggtgaaccgtggcttgccggtcgtaccgtcgttcctgtgagtacgttaagcgggccggagctggcgttacaaaaattgggtaaaacgccgttaggacgctatctgttcacaagtagcacattaacccgggactttattgagataggccgtgatgccgggctgtgggggcgacgttcccgcctgcgattaagcggtaaaccgctgttgctaacagaactgtttttaccggcgagtccgttgtactaagaggaaaaaaatatggagtggagtctgacgcagaataagctgctggcgtttcatcgcttaatgcgtacggataagccaattggcgcgttactgctgctctggccaacattatgggcgttgtgggtggcgacaccgggcgttccccagctctggatcctggcggtgtttgtcgcgggtgtctggctgatgcgcgctgccggatgtgtggtgaatgattatgctgaccgcaagtttgatggtcatgttaagcgcacggcgaaccgaccacttcccagcggcgcggtaacagagaaagaggcgcgcgcgctgtttgtcgtgctggtactgattagctttttactggtgctgacgctgaatacgatgaccattctgttgagcattgccgcgctagcgctggcgtgggtgtacccgtttatgaagcggtatacccatctaccgcaagtggtgctgggcgcggcgtttggctggagcattccaatggcttttgccgctgtgagtgagagcgtgccattgagttgctggttaatgttcctcgccaatattctctgggcggtggcttacgacacgcagtatgcgatggttgaccgcgatgatgatgtgaagattggcattaaatccacggcaatcctgttcggccaatacgataaattgattattggtattttgcagattggcgtactggcactgatggcgatcatcggtgagttaaatggcttaggctggggatattactggagtattctggtggctggcgcgctgtttgtttatcaacaaaaactgattgccaaccgcgagcgtgaagcctgctttaaagcatttatgaataataactatgttggtctggtactatttttagggctggcaatgagttactggcatttctgatgatgtaaaaaagccggatgatcatccggctttcttctgggttgcctgatgcgcggcgcttctcaggcctacacaacacatcgcaatttattgaatttgcagattatggaaggccggataaggcgttttcgccgcatccggcaattctctctgattacccttcgccctgcgtcgcactctcaatcgtcaaacgcacgtcacttgtaatcaactccgccagcaactgataaaccttcatcgtttctgccggttcggcatcgccgctatcgctgatatacccttcatcacgcagtgtcagcaccagagaactgaacaccgccttgtcgaagaactccggcgcgttgatgccgtgcagcacggagagacgttgcgcgacggtgcggctctctttctccagcgtaccgcggttgatgctcgggttggcactcaacaaccagaaggtgatggcataacgttgcagcgtttcgcgcgcgcctgcggccagcagctgtagcgtgcgagaatgcgccgggttgatatgcaactcatcatcttgcagggtaatcagcccctgacgttgcatctcatttgccagcgcatcaataacgtccggcaactcgtcgcgatcccagcgcaggaacagctccgctttcagcattgggtaaagcacattgacgtgctccatcaatacgtcgcgggagatgtggcgatgctgggtgacgattgccgccatcaggctaggcagcaccaacatatgcgcaatgttgttgcgatagtaggtcatcagcaccgcttgctcgcgcggcagaatgatgatgtcgccgattgtgtctttctcgacttcaaacttgttcatttgcagcgcgtgatcgataagctcgctggcgctggcactaggaacggtagagtccgtggagtagggcacgttgcgcatcagatccaggtagcagttgagttgctcggttaactgctcgcgggtgagactgcgctgacgacttgccagtagcgcagtacagcacaggttcatggcgtttgccgcgcctgcgttgttaatgcgtaccatcagatcggcagcaatattattgaccgtcggcgttaaccatgccggacgcaccgcttcgatgggatcgatagattcacgccagtcaggtacatgctggttaaggtaggtcatcaacggcattggttcaccgaagttgacgtaaccctgaccgagattacgcagcttgcttaaaccgcgcagcatctgcggcaggctctctttctctttcgtcgcgccgcgcagttctttggcgtaagtacccacttccatgacgtgctcataaccgatatagatcggaatcagcgtaatcggacgcgtgccgccacgcagcatcgcctgaatggtcatgctcagcgtaccagttttcggatccagcaaacgccccgtacgggaacgaccgccttccacgaagtactcgacggaataaccacggctgaacagttcgccgagatactcccggaaaacggtggaataaagtttattgcctttaaacgtacggcgaataaagaacgcccccagacggcggaaaatcggcccggcaggccagaaattcaggttgatcccggcggcgatatgcggcggcaccagcccctggtgatacagcacgtaagaaagcagcaggtagtccatgtgactgcggtggcaaggcacatataccagctcatgaccgtcgtgggccagctggcgaacgcgctcagcgttatggacgttgatgccctggtaaagtcggttccaggtgaagcccagaatacggtcagtcaggcgaatcatctcgtaagagaaattcgccgcaatctcttccatcagtgcaatcgcgttctgctgcgctttttcatgggagatttttttgctgcgcgcttcatcttctaccgctttggcaatggcgcgggaggcgagcagcttattaaacagatcctgacgagcaggcaaacgtgggcctacggcagccagacgttgacgggcaaagtgcatacgcgccacgcgcgccagtttctgagcgatagttttatccgtgccgtgttcatccgccatacggcgcaggctaacactcgggctgaaacgcacaaaactgtcgcgaccgagccacagtacagcgaaaaatttctgtacgccgttaagcatacgcagcggcgggttcacttcgcctttttcacgccccggcgcgcgaccaaacatcacgctcactggcaccatctgcacatccagatttgggttgctacggtgcaaatcgagatagtcgtggaacagcttaatagactcttctttcggcgtgtaataggtgaacacacgcggcccgccgtgaatgaacacatagcgcggcagtagcgtgccgtcgatttccagcggctctaacgggtcaggcaagtcatgtgccagacactgggcgcgcaacgtcagcaaatctgctttgctgttgtacggtaaaacgtacataattggacgagaggtatccagccccagttccggggcaggatctgccggaatagacttgctttttaccaggatgcttaatggtaaattcagtaatttgtagtaaattcgtggccagccggacataaacgatgtaaagcctctggttaataatgcaaatgcgcggcaaggatagcagaaagtcatgggaaattctgtggtatccgctcatgtttcgcgcggcgctacgcaaacccgaatcatcggatttaacggtacactgatattgacgctcataatgtaaaaaggttctttcaatggccaataataccactggattcacccgaattatcaaagctgctggctattcctggaaaggtttacgcgctgcatggatcaacgaagcggcattccgtcaggaaggcgtagcggtattgttggcggtggtcatcgcctgctggctggatgtggacgcgattacccgcgtgctgcttatcagctccgtgatgctggtgatgattgtggaaatcctcaatagcgccatcgaagcagtggttgaccgaattggctctgaataccatgagctttccggacgcgcaaaagatatgggatccgctgcggtgctgattgccattatcgtcgccgtgattacctggtgcattctgttatggagccattttggataacccttccagaattcgataaatctctggtttattgtgcagtttatggttccaaaatcgccttttgctgtatatactcacagcataactgtatatacacccagggggcggaatgaaagcgttaacggccaggcaacaagaggtgtttgatctcatccgtgatcacatcagccagacaggtatgccgccgacgcgtgcggaaatcgcgcagcgtttggggttccgttccccaaacgcggctgaagaacatctgaaggcgctggcacgcaaaggcgttattgaaattgtttccggcgcaagtcgcgggattcgtctgttgcaggaagaggaagaagggttgccgctggtaggtcgtgtggctgccggtgaaccacttctggcgcaacagcatattgaaggtcattatcaggtcgatccttccttattcaagccgaatgctgatttcctgctgcgcgtcagcgggatgagcatgaaagatatcggcattatggatggtgacttgctggcagtgcataaaactcaggatgtacgtaacggtcaggtcgttgtcgcacgtattgatgacgaagttaccgttaagcgcctgaaaaaacagggcaataaagtcgaactgttgccagaaaatagcgagtttaaaccaattgtcgttgaccttcgtcagcagagcttcaccattgaagggctggcggttggggttattcgcaacggcgactggctgtaacatatctctgagaccgcgatgccgcctggcgtcgcggtttgttttagttctctcttcatcaggcttgtctgcatggcattcctcactagttctgataaagcactctggcatctcgccttacccatgattttctccaatatcaccgttccgttgctgggactggtcgatacggcggtaattggtcatcttgatagcccggtttatttgggcggcgtggcggttggtgcaacggcgaccagctttctctttatgctgttgctgtttttacgcatgagcaccaccgggctgactgcgcaggcttatggtgccaaaaatcctcaggcattagcccgtacgctggtgcaaccgttgctgttggcgttgggggctggggcgttaattgcgctgctgcgtacgccgattatcgatctggcgctgcatattgttggcggtagtgaggcagtcctggaacaggcgcggcgctttcttgaaatccgctggttaagcgcaccggcgagcctggcgaatctggtattactcggttggttactcggcgtgcaatatgcccgtgcgccagtaattttgttagtggtcggcaatatcctcaacattgtgctggatgtctggctggtgatggggctgcatatgaacgtgcagggcgcggcgctggcgacggttattgcggaatatgcaacattgctgattggtctgctaatggtgcgtaaaatcctcaaactacgcggaatttccggcgaaatgctgaaaactgcctggcgaggaaacttccgtcgcttgctggcgcttaaccgcgatatcatgctgcgtagcctgttgttgcaactctgtttcggcgcgatcaccgtacttggcgcgcgactggggagtgacattatcgctgttaacgcggttctgatgacgctactcacctttaccgcctatgcgctggatggttttgcctacgcggttgaagcgcactccggtcaggcatacggtgcgcgcgacggtagccagttgctggatgtctggcgggcagcgtgccgccagagcgggatcgtagcgttactgtttagcgtggtttatttgctggctggggaacacatcattgcgttactgacgagcttaacccagattcagcagctggctgaccgctatcttatctggcaggtgattttgccggtggttggcgtctggtgttatctgctggacggcatgtttataggcgcaacgcgtgccaccgaaatgcgtaacagtatggcggtggccgccgcaggttttgcgctgacgctccttacgctgccgtggctgggtaatcatgctttgtggctggcattaaccgtctttctggcgttgcgcgggctttctctggcggctatctggcggcgtcactggcgcaatggtacctggtttgccgcaacgtgacggttaaaaattctgaataaataatcctaagccaaattgctgactacacttaatctcacgttcagaagaaaagtgaacgtactctcattcacaacctaacgatgaggtcttgattatgaataaagatgaagccggcggtaactggaaacagtttaaaggtaaagtgaaagagcaatggggcaaactgaccgatgatgatatgacgatcattgaaggtaaacgtgatcaactggtcggtaaaatccaggaacgttatggttatcagaaagatcaggcagaaaaagaggtcgtggattgggaaacccgcaatgaatatcgctggtaattaatccctcctgcccgacgtgtacaaggatgtacgccctcttaacgcggtttctttttcacctgcacagagtgatcatgctggcactgttcaggatgacgacacgcttccacttctacacatgccgcacagagcccatgtgcttcaatcacattatgccgcagggcaaaccccatttttgccgccagcgtatgcataatgtcttccacgccttctgcacactcttctttcactgcgccgcagcgatcgcaaataaacatggcactcgtatgggtgggctgatcgaacagatgacagagcacataactgttggtggattccaccttatgcacaaaaccttgctcaagcagaaaatccagcgcgcgataaaccgttggcggcttggcttgcggttcagcttcgcgcagtaaatcaagcagatcataagcgctgatagcgccatcctgcagactcatcaggcgcaacacttccaggcgctgtggggtcaggcgcacattacgctgcgcgcagattttttcagcctgcgctaataactcctgcgttgtggtcttttccatcgggcacctcaaagtgggggttaagaatgtccttactttaccatgttccaggaaaaacaccgagaacccttattgttgccgtaatgttgattttctgctttgtaggtaaggtgttatgttgccttgtcgtaccattatcaacacgataataattaataattcatttttaaataaattgcttcaagttaactcgctatttatttaactgggtttaaacgcatacctgtagttcagaaattatgagcgatttttgatagtgaccagatggcaaaagaattataaggaggacacggtacgacaaaaaaggtagatgaatcatgttgaagataatacccggtgcaactggatactttaataaaacactcaatagtaatcaattcgataatgaagatgcaatcaaagataaattagataatagaggtagtatcaaaggtaaattaaataatatatatggtaaatctattgattatgcagcgctgcgtcatcgggatataattattgcaaaaatagatttgtttattcaacgaatcacgcataatttatggcatgcacgtaaaaaaatgtgtttttaattgtgcaaataaatgatctcaaaatgtgggtcaataagtatattgacgattgcactgatgaggatttaaacgatcgtgactttattgcaagtgttgttgaccgggctatttttcatttcgcgattaatagtatatgtaatcctggggataataaagatgcaatgcccattgaacaatgtacttttgatgtagaaactaagaatgaccttccctccacggttcagctattttatgaggaatctaaggataatgaacctttagcgaatatacattttcaagcaataggttctggttttttaacgtttgttaatgcctgccaggaacatgatgacaacagcttaaaattatttgctagcctgttaattagtcttagttattctagtgcctacgcagatttaagtgaaacagtgtatattaatgaaaataatgagagctacctgaaagctcagtttgaaaaattatctcaacgtgatatgaagaagtacctgggagagatgaagcgtctggctgatgggggagaaatgaattttgatggctatctggataagatgagtcatctggtgaatgaaggaacgctcgatcctgatattttaagcaaaatgcgagatgctgcaccacaattaattagcttcgcgaagagctttgacccaaccagtaaggaagagattaaaatacttacagacacttctaaattaatttatgatttgttcggggttaaaagcgagaaataatatgtgaagttcttcgatagtatggaaggcattatataaaaggacccaatatttattgggttcttttttctctatcaatactattagcagggagatatatcaccagagtttaatgtgtgattttttatttatcgtcgaacctggattgtttatcattggccttaacaaagttaacggctaataagattatttccatcacttcgtgagagcttcatgccttgagaggatctcaattttcttttgcaatgagacaggcgcttcctgttgttatggtatagtaccccgctattgagcctcctgaatagtgatgctgaataacataaccccatgatatatcgataaaataatctctacatttgaaaatgcacggtaattctgaaatgcaaaaaatcaaccaaaccagcgcaatgcctgaaaaaactgacgttcactggagtggtcggtttagcgttgcaccaatgctcgactggacggacagacattgccgctatttcttgcgtctgctttcccgcaatacgttgctgtataccgaaatggtgaccacaggggcgattattcacggtaaaggtgattatctggcgtacagtgaagaagaacatccggtagcgttgcaactgggcggtagcgatccggcggcgctggcgcagtgtgcaaagctggcagaagcgcgcggatatgatgagatcaacctgaatgtcggctgcccgtctgaccgggtgcagaacggcatgtttggtgcgtgtctgatgggtaatgcgcagctggttgccgactgcgtgaaagcgatgcgcgatgtggtgagcattccggtgacggtgaaaacgcgtattggcatcgacgaccaggacagctatgaatttctctgcgatttcatcaataccgtttccggcaaaggcgagtgtgagatgttcatcatccacgcacgtaaagcctggcttagcgggttaagcccgaaagaaaaccgtgaaatcccgccgctcgattatccgcgtgtgtatcaactgaagcgtgactttccgcatctgacaatgagcattaacggtggtatcaagagcctggaagaggccaaagcacacctgcaacatatggatggcgtgatggtcgggcgcgaggcgtatcagaatccgggtattctggcggcggtagaccgggagatctttggttccagcgataccgatgccgatccggtggcggtagtgcgcgccatgtatccgtacattgagcgtgaactcagccaggggacgtatctcggccatattacccggcatatgttgggcttgttccagggtattcctggcgcgcggcagtggcggcgttatttaagtgaaaatgcccataaagcgggtgcagacattaatgtgctggaacacgcgctcaaactggtggcggataagcgttaacttttcaccaaaaagtagtcaaattcaccacgccctgcgcaccgtcgcggggcgttttgctgttaaatcaatagattatttttggcatgattcttgtaatgccagcaagagatttcatatttgggagagcatcatgctggaactactttttgtgattggcttttttgtcatgctgatggtcaccggcgttagcttgctgggcattatcgccgcgctggttgtggcgacggccattatgttcctcggcggtatgctggcattgatgattaagttgctgccgtggttactactggcgattgcggtggtgtgggttattaaggcgattaaagcaccaaaagtgccgaaatatcagcgttatgaccgctggcgttactaagggattgtgcggatgatcacaacctaaggttttatccttagaacaaaataggaattaataatcaaatctgtcactattgcgcctctaacagattcatcgtgctgtaccctacatacagccgaactataaaaagaaagggcttcccaggtggaagccctatttcttttatggaatcagcaggctggaaccttgcgtcgcccggctttccagaatctcatgcgcacgctgcgcatccttcagcggatatttctgctgctcggcgacatcgaccttaatcacaccgctggcaatcaaagagaacagttcattactggcctcggttaattcctcccgcgtggtgatatagccttgcagggaagggcgtgtcacatacaagctgcctttttgattgagaatgcctaagttcacaccggtaaccgcaccactactgttgccaaaactgaccattaagccgcggcgttgcaggcaatccaggctccgttcccaggtgtctctgcccacggaatcgtacaccacgcgcactttcttaccgccggtgatctcttttaaccgctcgaccagatcctcttcacgatagttaataacctgccacgcgcccgcttttagcgcgctctgcgctttttgcgcggttcctacggtgccgataagtttcgcgcccagggcttttgcccactggcaggcaattaagccaacgccgccagccgctgcgtggaacaggaactgttcatcgggtttaatttcataggttttgcgcagcagataataaaccgttaagcctttcaggaaggatgccgcagcttgctcaaaagaaattgccgcaggcagaatcgccgctttatccgcaataatgttatgcacagagctgtaagcgcctaacgcgctctgcgcatagactacacgatcgcctgccttaatatgctttacaccactgccgactttactcacgatgcctgctgcttcggtgcctaatccgctgggtaggcttggcggcgggtaaaggccgctgcggatatatgtgtcgataaaattgatgccgatggctttattttcgacctggatttcattctccgccggatcggcaggagtgaactctacggcttgaagtacttccgggccaccgtgcttgtgaaattcaattcgtgttgccatgtgtcctccagaacgtatcgtcagggtctgcttcatatgataaagtttcgacccattctttatctcggtaactccattcactatggcaggaaataaacccttcaacaaacagcaggctgaaccccgcgaacgcgatccacaagttgccgggctgaaagtgcctccgcacagcatcgaagcggagcagagcgtgttgggcggtttaatgctagataacgaacgctgggatgatgtagccgagcgtgtggtagcagacgatttttacacccgcccacaccgtcatatctttactgaaatggcgcgtttgcaggaaagcggtagccctatcgatctgattactcttgcggaaagcctggaacgccaggggcaactcgatagcgtcggtggttttgcttatctggcagagctgagtaaaaatacgccaagtgcggctaacatcagtgcctatgcggacatcgtgcgtgaacgtgccgttgtccgtgagatgatcagcgttgcgaatgagattgccgaagctggttttgatccgcaggggcgtaccagcgaagatctgctggatctggctgaatcccgcgtctttaaaattgccgaaagtcgtgcgaacaaagacgaagggccgaagaacatcgccgatgtgctcgacacaaccgtggcgcgtattgagcagttgtttcagcagccacacgatggcgttaccggggtaaacaccggttatgacgatctcaacaaaaaaaccgctggcttgcagccgagcgatttgatcatcgtcgccgcgcgtccgagcatgggtaaaacaacatttgcgatgaacctcgtcgaaaacgcggcgatgttgcaggataaaccggtacttatcttcagcctggagatgccaagtgaacagatcatgatgcgttctctggcgagcctgagccgcgttgaccagactaaaatccgtaccgggcagctcgatgacgaagactgggcgcgcatttccggcaccatgggtattttgctcgaaaaacgcaatatctatatcgatgactcctccggcctgacgccaacggaagtgcgttcccgcgcacgccgtattgcccgtgaacacggcggcatcgggcttatcatgatcgactacctgcaactgatgcgcgtaccggcgctttccgataaccgtacgctggaaattgcagaaatctctcgcagcctgaaagcactggcgaaagaactgaacgtgccggtggtggcgctgtcccagttgaaccgttctctggaacaacgtgccgacaaacgcccggtcaactccgacctgcgtgaatctggctctatcgagcaggatgcggacttgatcatgtttatctatcgtgatgaggtgtatcacgaaaacagtgatttaaaaggcatcgcggaaattattatcggtaaacaacgtaacggcccaatcgggacggtacgcctgacctttaacggtcaatggagccgcttcgacaactatgcggggccgcagtacgacgacgaataataattattttatgaattaggtaattaaagcaaacacttatcaaggaacacaaatgcaagcggcaactgttgtgattaaccgccgcgctctgcgacacaacctgcaacgtcttcgtgaactggcccctgccagtaaaatggttgcggtggtgaaagcgaacgcttatggtcacggtcttcttgagaccgcgcgaacgctccccgatgctgacgcctttggcgtagcccgtctcgaagaagctctgcgactgcgtgcggggggaatcaccaaacctgtactgttactcgaaggcttttttgatgccagagatctgccgacgatttctgcgcaacattttcataccgccgtgcataacgaagaacagctggctgcgctggaagaggctagcctggacgagccggttaccgtctggatgaaactcgataccggtatgcaccgtctgggcgtaaggccggaacaggctgaggcgttttatcatcgcctgacccagtgcaaaaacgttcgtcagccggtgaatatcgtcagccattttgcgcgcgcggatgaaccaaaatgtggcgcaaccgagaaacaactcgctatctttaataccttttgcgaaggcaaacctggtcaacgttccattgccgcgagcggtggcattctgctgtggccacagagccattttgactgggtgcgcccgggcatcattctttatggcgtcagcccgctggaagatcgctccaccggtgccgattttggctgtcagccagtgatgagtctaacctccagcctgattgccgtgcgtgagcataaagccggagagcctgttggttatggtggaacctgggtaagcgaacgtgatacccgtcttggcgtagtcgcgatgggctatggcgatggttatccgcgcgccgcgccgtccggtacgccagtgctggtgaacggtcgcgaagtaccgattgtcgggcgcgtggcgatggatatgatctgcgtagacttaggtccacaggcgcaggacaaagccggggatccggtcattttatggggcgaaggtttgcccgtagaacgtatcgctgaaatgacgaaagtaagcgcttacgaacttattacgcgcctgactagtagggtcgcgatgaaatacgtggattaatcgttctgtaatatttgattgtctgtgccggatgcggcgtgaatgccttatccggccaataaaatcctaaaaattcaataagttgatgttctttcatgctcttataaaggtcgtgcctctggcggatgtacgtttgtcatgagtctcactctgttgctaattgccgttcgctcctgaacatccactcgatcttcgccttcttccggtttattgtgttttaaccacctgcccgtaaacctggagaaccatcgcgtgtttcaaaaagttgacgcctacgctggcgacccgattcttacgcttatggagcgttttaaagaagaccctcgcagcgacaaagtgaatttaagtatcggtctgtactacaacgaagacggaattattccacaactgcaagccgtggcggaggcggaagcgcgcctgaatgcgcagcctcatggcgctagcctttatttaccgatggaagggcttaactgctatcgccatgccattgcgccgctgctgtttggtgcggaccatccggtactgaaacaacagcgcgtagcaaccattcaaacccttggcggctccggggcattgaaagtgggcgcggatttcctgaaacgctacttcccggaaagtggcgtctgggtcagcgatcctacctgggaaaaccacgtagcaatattcgccggggctggattcgaagtgagtacttacccctggtatgacgaagcgactaacggcgtgcgctttaatgacctgttggcgacgctgaaaacattacctgcccgcagtattgtgttgctgcatccatgttgccacaacccaacgggtgccgatctcactaatgatcagtgggatgcggtgattgaaattctcaaagcccgcgagcttattccattcctcgatattgcctatcaaggatttggtgccggtatggaagaggatgcctacgctattcgcgccattgccagcgctggattacccgctctggtgagcaatagcttcagcaaaattttctccctttacggcgagcgcgtcggcggactttctgttatgtgtgaagatgccgaagccgctggccgcgtactggggcaattgaaagcaacagttcgccgcaactactccagcccgccgaattttggtgcgcaggtggtggctgcagtgctgaatgacgaggcattgaaagccagctggctggcggaagtagaagagatgcgtactcgcattctggcaatgcgtcaggaattggtgaaggtattaagcacagagatgccagaacgcaatttcgattatctgcttaatcagcgcggcatgttcagttataccggtttaagtgccgctcaggttgaccgactacgtgaagaatttggtgtctatctcatcgccagcggtcgcatgtgtgtcgccgggttaaatacggcaaatgtacaacgtgtggcaaaggcgtttgctgcggtgatgtaatgcaggaaagcaggctggagctacccagcctgcagtgaaattaaactgtcgtcgctttcactctttctttatagatgatttttttgatgccatcgttctacgtgagagataataaacgttgttagttcttttattgttaagcttatcccaattatctggaattccttatcctgtttttttgggtggagtaataatttctgcacatctaaccattattaaatttaataataagtatcgggtttgttacgatagaatatttctatatcctcaagaatatgctttgccttattgcctgtgactttctgagattcaattatagtatcgttaaattctaatgttaaagagaactcttttttccgctttgtgtaagtttaaccttatattgattaccaatatcaaataaaaaggtcctgtaatgagaataatcacctttaacctcctcggcaaaacagcaaagcgtgcaaatatacataaagtctttcttacccctgattttgttaactaaatcaataaatgcgtgaaaaactttacttgcaatagaacttgatacttcttctccaggtctaaaaaatcttttgcaatttttaactgtgtttctatgtataaaaagaaatctttggcataagagatatctttattatttagtgcatctagctcaacaggtaaagatgtcgttttgttgctattcacatatgatatattcatatcatcatctccatcgcgagtaataaaattaatcaccattgtagggtagggggctggtcaatcagaaatcatctttataaacttcgattgtttttgtaatgctgtatcattaagttcattaaatcgtacagcagataaatgttctatcaaatttcgctcatttgccgaggattcatcataataaacgtaaaattaatgtatccttacatcgagtaataaacattttttatacaaaaaaagacaggaacgtatttactgggttaaatataatcatcctgcttttcatcacaaaaaccgcagataatccttcctttccccggcagctggcgttatggtcagatggtttttgcaacaaatctcacaataaaaagtttcaacatactgactatttagggaaaaatatgcgcaagatcacacaggcaatcagtgccgtttgcttattgttcgctctaaacagttccgctgttgccctggccagttctcctagtccgcttaaccctgggactaacgttgccaggcttgctgaacaggcacccattcattgggttagcgtcgcacaaattgaaaatagcctcgcagggcgtccgccaatggcggtggggtttgatatcgatgacacggtacttttttccagtccgggcttctggcgcggcaaaaaaaccttcagcccagaaagcgaagattatctgaaaaatcctgtgttctgggaaaaaatgaacaatggctgggatgaattcagcattccaaaagaggtcgctcgccagctgattgatatgcatgtacgccgcggtgacgcgatcttctttgtgactggtcgtagcccgacgaaaacagaaacggttagtaaaacgctggcggataattttcatattcctgccaccaacatgaatccggtgatctttgcgggcgataaaccagggcaaaatacaaaaagccaatggctgcaggataaaaatatccgaattttttatggcgattctgataatgatattaccgccgcacgcgatgtcggcgctcgtggtatccgcattctgcgcgcctccaactctacctacaaacccttgccacaagcgggtgcgtttggtgaagaggtgatcgtcaatagtgaatactgacagagcgggagagcgtgatgctctcccgaatgctgtttttttaatcacacctttatcctttcgctgtcttgctgcaaactgattaagagagttttatcaaggagcagcacatgtggtatcaaaagacgctcacgcttagcgccaaatctcgtgggtttcatctggtaacggatgaaattctgaatcagctggctgatatgccgcgcgttaacatcggcttactgcatctgttgctgcaacatacctccgcctctctgacacttaatgagaactgcgatcccaccgtacgccacgacatggagcgttttttcctccgcaccgttcccgacaacggaaattatgagcatgactatgagggagcagacgatatgccttctcatatcaaatccagtatgctgggaacaagccttgtattgccggtgcataaagggcgtattcagaccggcacctggcaaggcatttggctgggggaacatcgcatccacggcggaagccgtcgcatcatcgcgacactacaaggggagtaaaaaatgaccattagcgagttgctacaatattgcatggcaaaaccaggcgcagaacagagcgtgcataatgactggaaagcgacgcagatcaaagtggaagatgtactgtttgcgatggtgaaagaagtagaaaatcgcccagctgttagcctgaaaaccagcccggagctggcggagctgctacgtcagcagcacagcgatgtgcgtccaagccgccatctgaataaagcgcactggagcaccgtgtatctcgacggtagcctgccagatagccaaatctattatctggtggatgcgtcttatcagcaggcggtgaatttactgccggaagaaaaacgtaaattgctggtgcaactctgaaaggaaaaggccgctcagaaagcggccttaacgattacagcatcggcttaaggaagcgtgccgtgtgacttgcttcgcactccgcgacggtttctggcgtaccggagacgaggatctcgccgccaccactgccgccttctggtcccaggtcgacaatccagtcagcggttttgatcacgtcgagattgtgctcaatcaccacaatggtgttgccctgatcgcgcagtttatgcagtacgtcgagcagttgctgaatatcggcgaagtgcagaccggtggtcggctcgtcgagaatatacagcgtctgcccggtgccgcgtttactcagttcacgcgccagcttcacgcgctgggcttcaccgccactaagggtggttgcggactgccccagtcgaatgtacgtcaggccaacgtccatcaacgtttgcagcttacgcgccagtgcaggtacggcatcaaagaactcacgcgcctcttcgatggtcatatccagcacttcgtggatggttttgcctttgtacttaatctccagcgtttcacggttatagcgtttacctttgcactggtcgcacggcacgtagatatccggcaggaagtgcatctccactttgatcacgccatcgccctgacaggcctcgcagcgtccgccacgaacgttaaagctgaaacgtcccggcgtatagccgcgcgcacgggattccggtacgcccgcaaacagttcgcgcacaggcgtaaacacgccggtataggtcgccgggttagaacgtggagtacgaccaattgggctttggtcgatatcgatcactttatcgaaatgctccagcccctgaatatcgcgatacggtgctggttcggcgatggtcgccccattcaactggcgttgggcaatcgggaacagtgtgtcgttaatcagcgtgcttttaccggaaccactaaccccggtgatgcaggtaaacagacccaccggcagcgtcagcgtcacgtccttcaggttgttgccgcgtgcgcctgtcagcttcagcactttttccggattcgccggaacgcgtttcttcggcacttcaatcttgcgtttgccgctcatgtactgcccggtcaagctctccggcaccgccataatcgcttccagcggaccttctgcgaccacttcaccgccgtgaacacctgcgcccgggccaatgtcgatcacatggtcagcggcgcgaattgcgtcttcgtcgtgctccaccacaatcacggtattaccgagatcgcgcagatggataagcgtacccaacaggcgctcgttatcacgctggtgcaggccgatagacggctcgtccagcacgtacataacgccaaccaggcccgcaccaatctggctcgccagacggatacgctgtgcttcaccgccagaaagcgtttctgcgctgcgggaaagcgtcaggtaattcaggccgacgttaacgaggaatttcagacgatcgccgatctctttaaggattttttctgcaatcttcgcccgctgacctgcgagtttgagattgttgaagaattccatcgcatgaccaatgctcatgtcggagatagcaggcagcggcgtattctcgacatacacgtggcgcgcttcccgacgcagacgcgtcccttcgcagctggcgcacggacgattactgataaacttggctaattcttcgcgtaccgcgctggattccgtctctttatagcggcgctccatattatgcagcacgccttcgaacggatgacgacgaatggaggtatcgccacgatcgttcatgtatttgaattcaatgttttctttgccagaaccgtacaacaccactttatgcacgttcgcgctcaggctgccccacggcgcttcgacgtcgaacttatagtgatctgccaggcttttcagcatctggaaataatagaagttgcggcgatcccagccacggatcgcaccaccagccaggctcagttccggattctggatcactcgatcaggatcgaaatattgctgtacgccaaggccgtcgcaggtcgggcaggcccccgccgggttgttaaagctaaacagtcgcggctccagttcacgcatactgtagccgcaaattgggcaggcgaagttggcggagaacagcagctcttccgctttcgggtcgtccatatccgccactaccgcggtaccaccggaaagctccagcgcggtttcaaaactctcggcaagacgttgggtaagatcgtcacgcaccttgaagcgatcaaccaccacttcaatggtatgtttcttttgcagttccagttttggcggatcggaaagatcgcagacttcgccatcaatacgagcacggatgtagccctggcttgccaggttctccagcgttttggtgtgttcgcctttgcgctctttaatgattggcgcgagtagcatcagacgcttgccttccggctggctcagcacgttatccaccatctggctgacggtttgcgccgccagcgggacgtcgtggtccggacagcgcggctcgccaacgcgggcgaataacaaacgcaaatagtcgtggatttcggtgattgtccccaccgtagaacgcgggttatgagacgtgcttttctgctcaatactgatggcaggagaaagcccctcaatatgatcgacgtccggcttttccatcagactcagaaactgccgcgcgtaggcggaaagggattcaacgtaacggcgctgcccttcggcatataaggtgtcgaaagcgaggctggatttgccagaaccgctaagcccggtcacgacaatgagcttgtcgcgggggataacgaggttgatgtttttgagattatgggtgcgggcgccccgaacttcgatcttatccattcacctttcccggattaaacgcttttttgcccggtggcatggtgctaccggcgatcacaaacggttaattatgacacaaattgacctgaatgaatatacagtattggaatgcattacccggagtgttgtgtaacaatgtctggccaggtttgtttcccggaaccgaggtcacaacatagtaaaagcgctattggtaatggtacaatcgcgcgtttacacttattcagaacgatttttttcaggagacacgaacatggccagcagaggcgtaaacaaggttattctcgttggtaatctgggtcaggacccggaagtacgctacatgccaaatggtggcgcagttgccaacattacgctggctacttccgaatcctggcgtgataaagcgaccggcgagatgaaagaacagactgaatggcaccgcgttgtgctgttcggcaaactggcagaagtggcgagcgaatatctgcgtaaaggttctcaggtttatatcgaaggtcagctgcgtacccgtaaatggaccgatcaatccggtcaggatcgctacaccacagaagtcgtggtgaacgttggcggcaccatgcagatgctgggtggtcgtcagggtggtggcgctccggcaggtggcaatatcggtggtggtcagccgcagggcggttggggtcagcctcagcagccgcagggtggcaatcagttcagcggcggcgcgcagtctcgcccgcagcagtccgctccggcagcgccgtctaacgagccgccgatggactttgatgatgacattccgttctgatttgtcattaaaacaataggttatattgttttaaggtggatgattaaagcatctgccagccataaaaaagaagcctccgttatggaggcttctacgtatcaggtcaaaatcattggccattgtggcggtgtctgattcatctcttctatcatcacgctctcgatgttgtgccagatagcggtgatgtccgccattgtgatgccaagcaaccccattgcgaaccaacaggcggaaacaacgcccagaccgctgctgatcaccgcaagcccgacataatcagaccgacgaaaacggatgttgagtgtgctggccagaaacatcattacggcactaagaagttgccagcgaagaagaaccacgccagtggtgagggtagccatcaaacaattcctctgaaaagagccgatgccctggacagcgcggcgttgttcacgggaggcgtggtacactctggctatcgcggggcttgcagaacacaaaaatgaaacactctgtttgtttcattaattttgtgaactatatcacaattgattgtttgttagccatattaggccgtgacttttattgctgtacagattatgtggtttttcagtggcattaagggcatatcttcccgccgcctctgcattcctgtaggaaattaattttgaatatcaatgaattattttcatccaggtgacgattagaaaggtatcaatttcaaatcaggcaaaagtgctatttataccgtaagatttatctaaagacgtcggtacccagggttttcaccttgcaatggccgggtataaacaggcaggaaattgatagcaatgagtcatcgtgcacgacaccaattactggcgttgccgggcattatctttttagttctctttcccatcattcttagcctatggattgccttcctttgggcaaaaagtgaagtgaataatcagctccgaacctttgctcaactggcactggataaatccgagctggtcattcgccaggcagatttagtgagcgatgcagctgaacgctatcaggggcaagtttgcactccagcccatcaaaagcgaatgttgaatattattcgtggctatctttatattaatgaattgatctatgcccgtgataaccattttttatgcagtagcctgatagcgcctgtaaacggctatacgattgcaccggccgattataagcgtgaacctaacgtttctatctattattaccgcgatacgccttttttctctggctataaaatgacctatatgcagcggggaaattatgtggcggttatcaaccctctcttctggagtgaagtgatgtctgatgacccgacattgcaatggggtgtgtatgatacggtgacgaaaacctttttcagcttaagcaaagaggccagcgcagcaacgttttctccgctgattcatttgaaggatttaaccgtacaaagaaatggctatttatatgcgacagtttatagcacaaaacgcccaattgcagccattgttgcgactagttatcaacgtcttataacccatttttataatcatcttatttttgcgttgcccgccggtattttggggagtcttgttctgctattactctggctacgtattcgacaaaactatttatctcccaaacgtaaattgcaacgcgccctcgaaaaacatcaactttgtctttattaccagccaataatcgatatcaaaacagaaaaatgtatcggcgctgaagcgttgttacgttggcctggtgagcaggggcaaataatgaatccggcagagtttattccgctggcagaaaaggaggggatgatagaacagataactgattatgttattgataatgtcttccgcgatctgggcgattacctggcaacacatgcagatcgctatgtttctattaacctgagcgcctccgattttcatacgagtcggttgatagcgcgaatcaatcagaaaacagagcaatacgcggtgcgtccgcagcaaattaaatttgaagtgactgagcatgcatttcttgatgttgacaaaatgacgccgattattctggctttccgccaggcaggttacgaagtggcaattgatgattttggtattggctactctaacttgcataaccttaaaagtttgaatgtcgatattttgaaaatcgacaaaagctttgttgaaacgctgaccacccacaaaaccagtcatttgattgcggaacacatcatcgagctggcgcacagcctggggttaaaaacgatcgctgaaggcgtcgaaactgaggagcaggttaactggctgcgcaaacgcggcgtgcgctattgccagggatggttctttgcgaaggcgatgccgccgcaggtgtttatgcaatggatggagcaattacccgcgcgggagttaacgcgcgggcaataaaattacaggcggtggcgataatcgctgggagtgcgatcaaactgccgacggaaaacgcgggagaaggtctgctggctgacataacccaggtccattgcgatatcaaaaatcggacgctcggtggtgcgcaactcaacggcggccagtaacaggcggcgttggcgaatgtaatcgccaagcgtctgatgcgtcaccgtgcggaacattcgttgcaagtaccacttactatagccacttttttttgcgactacatcaatgttaagcggctggtcaatatgctcgtcaatccatgcgataagatcctgaataattttctgatgggacataaatctgcctcttttcagtgttcagttcgttaattcatctgttggggagtataattcctcaagttaacttgaggtaaagcgatttatggaaaagaaattaccccgcattaaagcgctgctaacccccggcgaagtggcgaaacgcagcggtgtggcggtaagcgcgctgcatttctatgaaagtaaagggttgattaccagtatccgtaacagcggcaatcagcggcgatataaacgtgatgtgttgcgatatgttgcaattatcaaaattgctcagcgtattggcattccgctggcgaccattggtgaagcgtttggcgtgttgcccgaagggcatacgttaagtgcgaaagagtggaaacagcttagctcccaatggcgagaagagttggatcggcgcattcataccttagtggcgctgcgtgacgaactggacggatgtattggttgtggctgccttagccgcagtgattgcccgttgcgtaacccgggcgaccgcttaggagaagaaggtaccggcgcacgcttgctggaagatgaacaaaactaaagcgccacaagggcgctttagtttgttttccggtctttgtctttctctctatcccgctggtacacaggagggtttcccccgacgtcaacacacctcattcgagcacgtggtggaggttccggttggtgttgatgctttaattgtatgtcaccgacgtttcttcgccagtgtaaaagtatactttttaaccgcaatatttttgtcatctcagacgattttttatcgcaatcctgaacggtatacggctcgataacgctgcaatcttgcgcaccgacgataacgtttgcgcatcaattgcctggtttttcatcgtcaagacaataaaagagaaaaaagcagcaaacttcggttgaaaaagccgctatgatcgccggataatcgtttgctttttttaccacccgttttgtatgcgcggagctaaacgtttgcttttttgcgacgcagcaaattgtcgcaaacctggagcaggaagataacgtttcgctggcaggggattgtccgccacgcatcttgacgaaaattaaactctcaggggatgttttcttatgtctacgccaagtgcgcgtaccggcggtagtctcgacgcctggtttaaaattagtcaacgtggaagcactgtccgtcaggaagtggttgccgggttaacaacgtttctggcgatggtctacagcgtcatcgtcgttccaggtatgttgggtaaagcaggcttcccgcctgcggcagttttcgttgcaacctgtctggttgccggactcggttctatcgtgatgggtctgtgggctaatctgccgttggcgattggttgcgccatctccctgacagcgtttaccgcattcagcctggtgctggggcaacatattagcgtacctgtcgcgctgggtgccgtgttcctgatgggtgtgctgtttacggtaatttctgccacgggtatccgtagctggattttgcgcaacttgcctcacggtgtggcgcacggcacggggattggtatcggtctgttcctgctgctcattgccgctaacggtgtcggtctggtgattaaaaacccgcttgatggtctgcccgttgcgctgggtgatttcgcgaccttcccggtgattatgagtctggtaggtctggcggtgatcatcggcctggaaaaactgaaagtccctggtggcattctgctgaccattatcggtatcagtattgtcggtttgatcttcgatcctaacgtccatttctccggcgttttcgccatgcctagtttgagcgatgaaaacggcaatagtctgattggcagcctggacattatgggcgcgctgaatcctgtagtcctgccaagcgttctggcgctggtgatgacggcagtatttgatgccaccggaactatccgtgccgtcgccggccaggcgaacctgctggataaagatgggcagatcatcgacggtgggaaagcactgaccactgactccatgagcagcgttttctctggcctggtgggtgcggctccggcagcggtatacatcgagtctgcggcgggtacggcggcgggcggtaaaaccggtttgacggctatcaccgttggcgtgctgttcctcctgattctgttcctctctccgctctcttacctcgttccggggtatgcaacggctccggcgctgatgtacgttggcctgctgatgctgagcaacgtggcgaaaatcgactttgctgattttgttgatgcgatggcgggtctggttacggctgtattcatcgtgctgacctgtaacatcgtaacaggcatcatgatcggcttcgcgactctggtgattggtcgtctggtttccggcgaatggcgcaagttgaacatcggtacggtcgttatcgccgtggcgctggtgaccttctatgcgggtggctgggctatctaatctttcatcggattctgaaaacgggtggcaatggctgcccgtttttattttctccgcacattgtgtgagcttttgcgatattctgaaaaaaatgagaattcaggcataacgtctttctcagatcataaaaaacatcgcaaacagggaacgcatggaaatcttcttcaccatactgataatgaccctcgtggtcagcctgtccggggtggtcactcgtgtcatgccctttcagatcccgcttccgcttatgcaaatcgccatcggtgcgctactggcgtggccgacgtttggtttgcatgtggagtttgatcctgaactctttttagtcttgtttatcccgccgttgctgttcgctgatggctggaaaacgccgacccgtgaatttctcgaacatggtcgagagattttcggcctcgcgctggcgctggtggtggtcaccgtggtcggcattggcttccttatttactgggtggtgccgggcattccgctgatccctgcctttgcgctggcggcggtgctttctccgaccgatgctgtggcgctctccgggattgttggcgaagggcgcatcccgaaaaaaatcatgggcattttgcagggcgaagcgttgatgaatgacgcctccggtctggtgagcttgaagtttgccgtagcagtggcgatggggacgatgatcttcaccgtcggcggtgcgacggtcgaatttatgaaagtagccattggcggtattctcgccggttttgtggtgagctggctgtacggtcgcagcctgcgattcctcagccgctggggcggtgatgaacccgcgacgcagatcgtcctgctgttcctgctgccattcgcttcttatctgattgccgaacatattggcgtttccggcatcctcgctgcggttgccgccgggatgaccatcacccgctccggtgtgatgcgccgtgcgccgctggcaatgcgcctgcgtgcaaacagcacctgggcgatgctggaatttgtctttaacggcatggtgttcctgctgttaggtctgcagctgccgggtattctggagacgagcctgatggcagcagaaatcgaccctaacgtcgaaatctggatgctgtttaccaatattattctgatatatgcggcgctgatgctggtccgtttcggctggctgtggacgatgaaaaagttcagcaaccgcttcctgaagaagaagccgatggagtttggtagctggaccacacgagaaatcctgatcgcgtctttcgccggggtgcgtggggcgatcactctggccggtgtgctctctatcccgctgctcttgccggatggtaacgtcttcccggcgcgctatgagctggtgttcctggcggctggcgtcattctcttcagcctgtttgtcggcgtggtgatgttgcctattctgctacaacacattgaagtcgcggatcatagccaacaattgaaagaggaacgtattgcgcgagcggcaacggcagaagtggcgattgtggcgatccagaaaatggaggagcgtctggcggcggataccgaagagaatatcgataaccagctgcttacggaggtcagttctcgcgtcattggtaacctgcgtcgtcgcgccgatggacgtaacgacgttgaaagttccgtgcaggaagagaaccttgagcgtcgcttccgtctggcggcattgcgttctgaacgtgctgaactttaccacctgcgcgccacacgggagatcagcaacgaaacgctgcaaaaattactgcacgatctcgatttgcttgaagcgttgctaattgaggaaaatcagtaagccgaaagcgacgtaaccaggcccgaggtaatctgaaaaaggtgcaatcttttgcacctttaacaggttagctcgggctaacattcatgattctaaaacaaataaattatctctcttttaaagtcaattcattggctgttcttcgacttaacctcaatctgcatcttgcataatatctgcagtaatcttcatagcgactgcatgaagattatcctcagtttgactcatgccagtatgagtggcacaatcttcttcaaagaatttctgtagtgttaccaggatatcactattaatggagatattttcctcaccacggagaatggtaatacccattccctggacgctagcctcatcgaaattaacacgatagagacggatattaaacatccaggcttttgttaaaacagaacagttgaaatggcaattgcttaaattggcattattaaaattaacattagccatattagagtcggtacatataaccatttcgaggaacgtatttgttaaccgcgtaaaaaagagtttgctatcaattaagtttatattctggagggttgctttattcaggttgacacgagacagatcagcatgttcaaagttaattaaatcaagtttagagaagctaaggtcggctctaaataaattaatatatggcgctattactttataaagatttacctcagccatgtatgccatataaaaattactataatcaaggaaggtatttttaatattggctctattcattgttgcattgtagaattgaacatgcatagcggaacaactatttagagttccgtcagtcatttttatctgagcgaaattactgtcatcgagaatacaattatcaaaaagtattttttccattatggcgaaattaaaattcgttttatacatattacagtcctgaaaaatagcgttttgtagtctgcaacctgcaaaattgctattggataaatcttcatctttaatcacgatacctttcaggctaaggtgactaaaatcgtaaccaccatttactgtctgtgggatttcgatagtattattatggacggtgacattatttataaaatataccaccttaatactcacttccttatctttattaaggtaaactcttctcgtaattctatcgtcacatttattatttgcatgactagctatatctataaaatatttatgtattttcctgtccgtttctttcgtgatttttccacttggtaaactatcataaattcttttcattttctgaatcaagcctatcactttttcatgatcatccattttgaaaagagagagggctttattgtcaattaacgtgtttttatgatgtttgctgtaattatcactttttgttttctttgtatgacttggacttgtgacagagtggttatcgttaatcaggcaaagagggaaaaacatattatttaaaccattatagcgcataaaatatccttataattaacaagaaagaaaaggcatattctctgcattatcattttctacgactgtcaaaaatcgctcattttttaatgagtttatttgtttaatattatgggaaaaggtgatgcatttgggagaggaagagtattccccggtcagacgaccggggaaggggagagattaatgcgcgcggccttgctcaacgccaaagccggtctgggagcggataaactgcgcgcggaacagttcacgctcacgcgcgccttccgcactgttatcggttgcgctgaagaaccagatgccgaggaatgccacggtgatagagaacagcgccgggtattcatacgggaagatggctttttcgtgaccaaggatctgtacccaaatcgtcgggccgaggatcatcagtactactgcggtaatcagccccagccagccacccatcatcgcgccacgcgtggtcagtttgctccagtacatagaaagcagaatgatcgggaagttacagctcgccgcgatggcaaacgccagccccaccataaaggcgatgttctgattctcaaacagcacgccgaggataatcgcaatcacgccgaggatcagtacggtgattttacttacccgcagctcttcacgttcggtcgcgccttttttgaagacgttagcgtacaagtcatggctaaccgcggatgcgcccgccagcgtcagacccgcaaccaccgcgaggatagtggcgaaagcaaccgcactaataaaaccgaggaacaggttgccgcccactgcattcgccaggtgaacggccgccatgttgttaccaccaatcagatggcccgccgcgtctttatattccggattcgcaccaaccagcatgatcgcgccgaagccgataataaaggtcagaatatagaagtagcccataaacccggtggcgtagaacacgctcttacgtgcttcgcgggcatcgctgactgtaaagaagcgcatcagaatgtgcggcaagcccgccgtaccaaacatcagtcccagacccagagagagcgcggagatcggatctttcaccagcccgcccggcttcatgatgtcgacacctttcgggtgtaccgccatcgcttcactgaacagattgttgaagctaaagccgacgtgtttcatcaccataaaggccataaagctggcaccgaacagcaacagcacggctttgataatttgcacccaggtggtcgccagcatgccgccgaacaggacgtacatcatcatcagcacgccgaccagcaccaccgcaatgtgatagttaaggccaaacagcagctcgatcagtttacctgcgcccaccatctgggcgataaggtaaagcgccaccaccaccagagaaccacaggcgctaagaatacgaatcggcccttgtttcagacggtaagaggccacatcggcaaaggtgtagcgccccaggttacgcagacgttcggcaatcaggaacaaaatgatcggccagcccaccaggaagcccaggctgtaaattaagccgtcatagccggaggtaaacaccagcgcggagatccccaagaaactggcggcggacatatagtccccggcaatcgccagcccgttctggaagccagtgatattgccgcctgcggtgtagtagtcgctacgagaacgtacgcgtttacttgcccagtaggtaatgccgagcgtaaacacgacgaaaatcaggaacataataatcgcctgccagttcgttggctggcgctctacggccccgctaatagcatccgcggcgttagctgcgaaagggagtgtggcggcaagcgccgtcagaactcttttcatgatgcttgtacctcatgcagttatttcaacttgcttgtacctcatgcaggacttcattattaagacggtcgaattcgccgttcgcccgccagatgtagataccggtgagaacaaaggagatcacaatcactccaacaccaattggaataccgcgtgtgacgctggtgttcggattcagcggcgtgcccagccagccgggcgcgaaggcgatcagtaaaataaagccgatataaactgccagcataataatgctcaggatggtggcaaaccgttgccgtttttcgactaactccctgaaatgcgcattgtcttctatccgctgataaatagtgccattcatcacagattctccagaggtaatgtagggattgttttaattcccgctcccttatgggagaaggttaacgctcgggtaacccttgccgaatgtaggccggataaggcgtttacgccgcatccggcaatcaatgcctgatgcgacgctgtcgcgtcttatcaggcctacaaaccgttaccgactcgcatcgggcaattgtgggttagcttggcatcgcgatagcctgcttctcttcaagcagcttctcgactacgccaggatcggcaagcgtgctggtatcgcccaggttgctggtatcgcccgccgcaattttgcgcagaatacggcgcataattttgccggagcgggttttaggcagggagtcggtccagtgcagcacgtctggcgtcgccagcgggccaatctctttacgcacccagttgcggacttctgcgtacagttctggactcggttcctccccgtgattaagcgtgacgtaggcgtagatcgcctgacctttaatattgtgcggaatacctactacggcggcttcggcaatcttcggatgcgccaccagcgcgctctcaatctctgccgtccccagacggtgaccggagacgttcagcacgtcgtccacacgcccggttatccagtaatagccatcttcatcgcgacgcgcgccgtcgccgctgaaatacatatttttgaaggtggagaagtaggtctgttcaaaacgttcgtgatcgccaaacagcgtacgcgcctgacccggccaggagtcggtgattaccaggctaccttcggtggccccctccagcgggttaccttcgttatcgaccagcgccggttgcacgccgaagaacggacgtgttgcgctaccggctttcagctcggtagcgccaggcagcggggtgatcatgaaaccgccggtttcggtctgccaccaggtatcgaccaccggacatttctcgttgccgatttttttccagtaccactcccacgcttccgggttaattggctcgcccacggaaccgagaatgcgcaggctgctacggtcggtgccttcgatcgctttatcgccttccgccatcagcgcgcggatcgccgtgggtgcggtatagagaatattgacctgatgcttgtccaccacctgcgccatacgggcaggcgtcggccagttgggtacgccttcaaacatcagcgtggtcgcaccgcaggccagcgggccgtacagcaagtaactgtgtccggtcacccagcccacatcggcggtgcaccagtagatatcacccggatgataatcaaagacatatttaaaggtcagcgccgcgtacaccagataaccgccggtagtatgcagcacaccttttggcttaccggtagaaccggaggtgtagagaataaacagcggatcttcggcgttcatctcttccgcctggtgctgatcgctcgcttgctcaaccaggtcgtgccaccacaggtcgcgcccttcctgccagtcaattttcccgccagtacgcttcagtaccaccacatgctctacgctggtgacgttcgggtttttcagcgcgtcatcaacgtttttcttcagcggaatactgcgcccggcacgcacaccttcgtcggaagtgatcaccagtcgactgttggaatcaataatgcgcccggcaacggcttccgggctgaagccgccgaaaatcacgctatgcaccgcgccaatgcgggcgcaggccagcatcgcaaccgcggcttccggcaccatcggcatataaatcgccaccacatcaccttttttaatgcccagctcgagcagggtattggcgaagcggcagacgtcgcggtgcagctctttatagctgatatgtttgctctggctggcgtcgtcgccttcccagatgatggcggtacgatcgccgttttcttgcagatggcggtcaaggcagtttgccgccagattcagcgtgccgtcctcgtaccatttaatggacacattaccgggggcaaaggaggtgtttttcaccttctggtaaggtttgatccagtcaagaatttttccctgttcgccccagaaggtatcaggtacgttaatagattgttgatacatcgcctcgtactgctgagggtttatcaggcaacggtctgcgatgttggcaggaatggtgtgtttgtgaatttggctcatgcttttgttctccttgtaggatgttaataatatgtggcataagcgttaaatgtaggggtattggcagttttgtttagtatttgggcgacagatcacgcaaaagtagaattgtgcaaataaacggcagggtaatttttgaaggtcagcaacaaaagttgattaattctttgaggaacatgcagttatgcatgctgttgaaaaagaggaagatactgactaactctaaagtggtattttacatgcacttacaattgattaaagacaacattcacagtgtggttatttgttacacataggggcgagcaatgtcatgacagtgtaggtgcggttactgtcgtgaaaaacaataaaaaccgccattgcaacaatggcgcaattcggatgaagcccctatgacaaggataaaaataaacgcacgccgtatcttcagcttattgattccttttttctttttcacttctgttcacgctgaacaaacggctgctcccgcaaaacctgtaactgtggaagcgaagaatgaaacctttgccccgcagcatcccgatcaatatctctcctggaaagccaccagcgaacagagtgagcgtgttgacgccctggcggaagatccacggctggtgatcctgtgggcggggtatcccttcagccgcgattacaacaagccgcgtggacatgcttttgctgtgaccgatgtgcgtgaaaccctgcgtaccggtgcgccgaaaaacgctgaagatggtccgctaccgatggcatgctggagttgtaaaagcccggatgtggcgcgtctgatccagaaagacggcgaagatggctacttccacggtaaatgggcgcgcggcggtccggaaatcgtcaacaacttaggttgtgccgattgccataacaccgcctctccagagttcgccaaaggcaaaccgaagttaaccctttcccgtccgtatgcggctcgcgcgatggaagccattggtaaaccttttgagaaagccggacgtttcgaccagcaaagcatggtttgcggtcagtgccatgtggagtattacttcgacggcaaaaacaaagcggttaaattcccgtgggatgacggcatgaaagtcgaaaatatggagcagtattacgacaaaattgccttctctgactggactaactccctgagcaaaacgccaatgctgaaagcgcagcacccggaatatgaaacctggacagcgggcattcacggtaaaaacaacgtgacctgtatcgactgccatatgccaaaagtgcagaacgccgaaggcaaactctacaccgaccataaaattggtaatccgtttgataacttcgcccagacttgtgcgaactgccatacccaggacaaagctgccttgcaaaaagtggtcgcggaacgtaagcagagcattaacgacctgaaaatcaaggttgaagatcaactggttcacgctcacttcgaagcgaaagcagcgctggatgcaggcgcgacggaagctgaaatgaagccaattcaggacgatatccgtcatgcccagtggcgctgggatctggcgatcgcttcccacggcattcatatgcacgcaccggaagaaggtttacggatgctcggtacggcgatggataaagcggcggatgcacgcaccaaactggcgcgcctgctggcgaccaaaggcatcacccatgaaatccagatcccggatatcagtaccaaagagaaagcccagcaggccattggcctgaacatggaacaaatcaaggccgagaagcaggacttcatcaaaacggtgatcccgcagtgggaagaacaggcacgtaaaaacggtctgttaagccaataaccccgttccgcctcgcaaggggcggaaaacacaatggagtgaatatgagcgtattacgtagcttattaactgccggggtgctggcgagcggcctgttgtggagcctgaacggaattaccgctacccctgcggcgcaggcatctgatgatcgctacgaagttacccagcagcgtaacccggatgccgcctgtctggactgtcataaaccagataccgaaggtatgcatggaaaacatgcttccgttatcaacccgaataacaaactgccggtcacctgcaccaactgtcacggccagccaagtccgcaacaccgcgaaggggtgaaagatgtgatgcgctttaacgagccgatgtacaaggttggagagcagaacagcgtctgtatgtcctgtcatctgccggaacagttgcaaaaagcgttctggccgcacgatgtccacgtaaccaaagtggcgtgcgccagctgccattccctgcatccacagcaagatacgatgcagacgttaagtgacaaaggacggattaagatttgcgtcgattaccacagcgatcagcgcaccaatccgaactttaacccggcgtctgttccgttgcttaaggagcagccatgacctggtctcgtcgccagtttctcaccggcgtcggcgtgctggcagccgtcagcggcaccgcagggcgcgtggtggcgaaaacgttgaatatcaatggggtgcgttacggcatggtgcatgacgagagcttatgcatcggctgtaccgcctgtatggatgcttgtcgggaagtgaacaaggtgccggaaggcgtcagccgcctgacgattattcgtagcgagccgcagggcgaatttcctgatgtgaaatatcgcttcttccgtaagtcttgccagcactgcgatcatgcgccgtgcgttgacgtctgcccgaccggtgcgtcttttcgcgatgctgccagtgggattgtcgatgttaatccggatctctgcgtcggttgtcagtactgcatcgccgcctgtccgtaccgcgtgcgctttatccatccggtcacgaagacggcggacaaatgcgatttctgccgtaagaccaatttgcaggccggtaagttgcccgcgtgcgttgaagcttgcccgaccaaggcgctgacgtttggcaatctggacgatcccaacagtgagattagccaactgctgcgccagaagcccacttaccgctacaagctggcgctgggaaccaaaccgaagctgtaccgcgtaccgtttaaatacggggaggtgagccaatgacgcagacttccgcatttcattttgaaagcctggtgtgggactggccgattgccatctacctgtttttgattggtatttctgctggtctggtgacgctggccgtgctgttacgtcgcttctacccgcaggcgggcggtgcagacagtacgttgctgcgcaccacgctgattgtcgggccgggcgcggtgatcctcggtctgttgatcctcgtcttccacctgacaagaccgtggaccttctggaagctgatgttccactacagttttaccagcgtgatgagcatgggggtgatgctgtttcagctctacatggtggtgctggtgctgtggctggcgaaaatctttgaacatgatttgcttgccctgcaacaacgctggttgccgaagctggggatcgtgcaaaaggttctgagcctgctgacgcccgttcatcgcggactggaaacattgatgctggtgctggcggtgttgttgggggcttataccggctttctgctgagcgcgctgaaaagctatccgttcctcaataacccgatcctgccggtgctgttcctcttctccggcatcagctccggtgcggcggtggcgctgatcgccatggcgatacgccaacgcagtaacccgcattccacggaagcgcagtttgtacaccgtatggaaatccctgtggtatggggtgaaatcttcctgctggtggcgttttttgtcggtctggcgctgggcgatgacggtaaagttcgtgcgctggtggcggcattaggtggcggtttctggacgtggtggttctggcttggtgtcgccgggctggggctgattgtgccaatgctgctcaaaccgtgggtcaatcgcagttccggcattcctgccgtgctggcggcgtgtggggccagtctggtcggcgtgttgatgctgcgctttttcattctctacgccggacagttgacggtggcgtaagccagaaaagaggtggtttctggacgtattccttcctgaagtcggttttctggcgttgttgttaagtctcggggtcaacgtgttgaccccgttgacggccttcgcgggagtgcggttgcgctggcctgccatgatgcgactcacttgcatcggcattctggcgcagttcgcgctcctgctgctcgcctttggcgtactgacgtattgttttctcatcagcgatttcagcgtcatttatgtcgcgcaacatagctatagcctgctgagctgggaactcaagctggcagcggtgtggggcggccatgaaggtagcctgctgctttgggtgctgctgctttccgcctggagcgcgctgtttgcctggcattatcggcagcaaaccgatccgctatttccgctgacgttagccgttttatctctcatgctcgccgcactgctactgtttgtggtgctgtggtccgatcccttcgtgcggatatttccaccagcaatcgaaggccgcgatctcaatccgatgctgcaacatcccggtcttatctttcatccaccgctgctttaccttggctatggcggtttgatggtagcggcgagcgtggcgctggcgagtctactgcgcggcgagtttgatggtgcctgcgcccgaatttgctggcgctgggcgttacctggctggagtgcattaacggcggggatcatcctcggttcctggtgggcctactgcgaactcggctggggcggctggtggttctgggatccggtggaaaacgcctctttattaccctggctttctgccactgcgctgctgcacagtttgtccctgacacgccagcgggggattttttgccactggagcctgttgctggcgatagttactctgatgctgagcctgctgggcaccttaattgtccgttctggcattctggttagcgttcatgcgttcgcgctggataacgtccgcgccgtgccgttgttcagcctgtttgcactgattagccttgcgtctctggctctgtatggctggcgagcgcgggacggtggcccggcggtgcattttagcgggttaagccgggaaatgttaatcctcgctacgctgttgctgttttgcgcagtgctactgatcgtgctggtgggaacgctttatccgatgatttacggcctgctgggctggggacgcctctccgttggcgcgccgtattttaaccgcgcgacgttaccgtttggtctgttgatgctggtggtgattgtgctggcgacgtttgtctctggcaaacgcgtgcagcttccggcgctggtagctcatgcgggcgtgctgttatttgccgctggggtcgtggtctccagcgtcagccgtcaggagatcagcctgaatttacagccgggtcagcaggtgacgctggcaggatacaccttccgttttgagtgcctcgatctacaagccaaaggcaattacaccagcgaaaaagcgatagtggcactgtttgaccatcagcaacgcattggtgaactgacgccggagcggcgtttttatgaagcacgccgtcaacaaatgatggaaccgagtattcgctggaacggcatccatgactggtatgcggtcatgggggagaaaactgggccggatcgttacgcttttcgtttgtatgtacaaagcggtgtgcgctggatctgggggggaggattgttgatgattgcgggcgcattgttaagcggatggcgggggaagaagcgcgatgaataaagggcttctcacgctactgctgttatttacctgttttgcgcacgctcaggtcgtagacacctggcaattcgccaatccgcaacaacagcaacaggcgttaaatattgccagccagttacgttgtccgcagtgccagaatcaaaacttactggaatccaacgcgccggtggctgtcagtatgcgccatcaggtttacagcatggtggcggaggggaagaacgaagtcgaaatcattggctggatgaccgaacgctacggagattttgttcgctataacccaccgttaacgggtcagacgctggtgttatgggcgctgccagtggtgttgttactgctgatggcactgatcctctggcgagtgagggcgaagcgatgaaacagcccaaaataccggtgaaaatgctgacaacactcacgatattgatggtatttctctgtgtcggcagttatctgttaagcccaaaatggcaggcggtacgtgcggagtatcagcgtcagcgcgatccgctacatcagtttgccagccagcaaaccccggaagcgcagcttcaggcattgcaggataaaatccgcgctaatccacaaaacagcgaacagtgggcgttactgggcgagtactatctgtggcaaaacgattacagcaatagcttgctggcgtaccgtcaggcgttgcaactacgtggtgagaacgctgaactgtatgcggcgctggcgacggtgctttattaccaggccagccagcatatgaccgcccagactcgcgcaatgatcgacaaggccctcgcgctggacagtaatgaaatcaccgccctgatgctgctggcttccgatgcgtttatgcaggcgaactacgcgcaagccatcgaactatggcaaaaagtgatggatctcaacagtccgcgagttaaccgaacacagctggttgagagcattaatatggcgaaattgttgcagcggagattggattaatcatctggtgatgaagattatgtcattgagctgcataaaaaataatcgaatgaacatatgccaaaaataatcactaatcagtattattgcagattaaacaaataaaaatctttccataacaaatggttattcattaatcctgccataaactcgcgttattatgcattaatgcagcgaaaagctctgttgttaaagggttgcgcaacataccgcgcaaatgatactgatcataagcgttaaaaaaatctacaaaccaacgcaacacaattcatgccccggcagtatgtcacgttctcgcgtttctgaacggggaacggcgctccattgaggaagtcattcatatgaaaaatataaaattcagcctggcctggcagattctgtttgctatggtgctgggcattctcctgggaagctacctgcactaccatagcgacagccgcgactggctggtcgtcaatttgctctctccggcgggtgatatcttcatccatctgattaaaatgattgttgtgccgattgtgatctccacgctggtggtgggtatcgcgggtgttggtgatgccaaacagctcgggcgtattggcgcgaaaaccattatctacttcgaggtgatcaccaccgtcgccatcattttggggatcactctggcgaacgtcttccagcccggtgccggggtggatatgagccagttggcgaccgtcgatatcagcaaatatcagagcactacggaagcggtacaaagcagttcccacggcattatgggcacgattttgagcctggtgccgacgaacattgtggcgagcatggcgaaaggcgaaatgctgccgatcatctttttcagcgtgctgtttggtctggggctttcttccctgcccgcgacgcatcgtgaaccgctggtgaccgtgttccgctccatctctgaaaccatgtttaaagtgactcacatggtgatgcgttatgcaccggtgggtgtgtttgcgctgattgcggtgacggtggctaactttggtttcagctctctgtggccactggcgaaactggtgctgctggtgcatttcgccattctgttcttcgcgctggtagtgctgggaattgtggcgcgcctgtgcgggttaagcgtctggatcctgattcgtattctgaaagatgagctgattctggcgtactccactgccagctctgaaagcgtgctgccgcgaattattgagaagatggaagcctacggagcaccggtgagcatcaccagtttcgtggtgccgaccggttactcttttaaccttgatggtagcacgctgtatcaaagtattgccgctatcttcatcgcgcagttgtatggcattgacctgtccatctggcaggaaatcattctggtgctgacgctgatggtgaccagcaaagggattgctggcgtgcctggcgtgagctttgtggtgttgctggcaacgctgggtagcgtaggtattccgctggaaggtctggcgtttattgctggtgttgaccgtatcctcgacatggcgcgtactgcgctgaacgtggtgggtaatgcgctggcggtgctggtgattgccaagtgggaacacaaatttgaccgtaagaaagcgctggcttatgagcgtgaagtgctgggcaaatttgataaaactgcggatcaataattgaagattgccggggatatccacccggcaatgtgtgaatgcctgatgcgacgcttgccgcgtcttatcaggcctacgccagacagcgcaatagcctgatttagcgtgattttgtaggtcggataaggcgtttatgccgcatccgacatcaacgcctgatgcgacgcttaacgcgtcttatcaggcctacgccagacagcgcaatagcctgatttagcgtgattttgtaggtcggataaggcgtttacgccgcatccgacatcaacgcctgatgcgacgcttgccgcgtcttatcaggcctacgccagacagcgcaatagcctgatttagcgtgattttgtaggtcggataaggcgtttatgccgcatccgacatcaacgcctgatgcgacgcttaacgcgtcttatcaggcctacgccagacagcgcaatagcctgatttagcgtgattttgtaggtcggataaggcgtttacgccgcatccgacatcaatgcctgatgcgacgcttgccgcgtcttatcaggcctatcttaaccgttggttaatttttcaaactcttcacacccggtatcaaacccttccatacagctcaggttcaaccagtgcagcgccttttgcttgttcttctcgataaaaccttcttcaccgtttaagaacatcattcccgcccagtactcggaataaccggttcgggaaattgcagagctgcgtttgaaataccaggttgccttgtcatcgtcggccttaatgcccacgccgttggcgtaaatcaaaccaagcagcatttgggcatcgacggcagagtcgttctccagatcttcgctggcgttttctaacaggctaattgcctttggataatccggtttacccgcttgagtatttaccagaatatgcgccagcgttacttcaccttctttactgcccgcttgcgccgctttctctgcaagaacttttgcttgtggatagtccagactgaccggattggtgattttgatctgcgccagcagcgcgcaggcatcagcatcaccgctgtcggcggctttctgtgcccaatattcggctttgctcaaatcgccggagctaaaccagctgtcggcaagaaaatattgtgcgcgtcggtccccggcctctgctgcctttaaatactggctgccaggctcggagtcgttggcgtgggcaaagaatgtcaaaaacaacatcaatgcgataatttttttcattttgataatacgattgggtagggagtaaccagtataaagagttcgaatggataaaaaaacagcctccgaaaggaggctgtagaaaggacggtattacgccagtgccgcttcgcgcaggcgagttttcaacttgttgtactcgtcaatcacgtactgctcggcggcgcgctgatcggcgatcggctcgacgcgaacggcgcagtatttgtactccggcgttttcgtaatcgggcttaagttttcggtaaccagctcgttacaggcaccaatccaccactggtaggtcatgtaaatcgcccctttgttcggacgatcgctgacctgcgcacgggtgataattttgcctttacggctgtgcacccaaaccaatgcctcatcttcaatacccagacgtttggcgtcttcggtattgatttgtgcgtagccaggttcatcagccagcgccgccagtgccgcacagttaccggtcatgctacggcaagagtagtgaccaacttcacgcaccgtactcagtaccatcgggtactcgtcggtgagtttgtcgattggcgctacccagtcgcaggtgaagaactgcgccagaccgttcggggtatcaaacttctctttaaacagataagaagtcccctgatcggcatcactagtatcgcggcaaggccactgaatgaagcccagttcgcccattttctcgtaagtcgcaccgtagaaatccgggcacagatgacgcaactcatcccagatctcctgggtgttgttgtagtgcatcggataacccatacgggtggcgatttcactgatgatttgccagtccgttttcagatcccatttcggttcaaccgccttgaagaaacgctggaagccacggtcagccgcagtaaacacgccttcatgctcgccccagctcgtactcggtaaaataacatccgccgcgctcgcggttttggtcataaagatgtcctgaacgataaccagttccagatcttcaaaggctttacgtactgcgctcagctccgcgtcagtttgtagcggatcttcgcccataatgtacgcggcacgcacttcgccatgcgctgcgcggtgcggcagctcgctgatgcgatagccggtatgcgctggcaggctttccacgccccaggctttggcgaatttctcgcggttagccggatctttcacgtactggtatcccggatacgtatccggcagcgcgcccatatcgcaggcaccctgaacgttgttctgaccacgaaccgggttaacacccgcatgcggcttaccgaggttaccggtcagcatcgcgaggctggtcagagaacgcacggtttccacgccctggtagaactgggttacacccatgccccacaggatggcggcgcttttcgcctgggcatacatccgtgccgcctgacgaatctcactggcgctgacgccggtgatatcttcaacgctctccggcgtgtagccttcaacgattttacgatactcttcaaagccttctgtacgactagcgacgaacgctttgtcgtacagattttcttcaataatgacatggcccatcgcattcaacagcgcgatgttgctgccgtttttcagtgcaatgtgcatgtcagcaatgcgcgcggtttcaattttgcgcggatcgcagacgataattttcgccccgttacgtttagcgttaattacgtgattcgccacgattgggtgggaatccgccgggttgtacccgaaaacgaacactaaatcggtattatcaatttcgttaatagcattgctcattgcgccattaccgacgctttggtgcagacctgcaacgcttgggccgtgtcagacacgagcgcagcagtcaacgttattggtaccaataacggcgcgcgcaaatttttgcattacatagttggtttcgttacccgtaccacggctggagccggtcgtctggatggcatccggaccgtacttctctttgatggcgctcaggcgctcggcaacgtaattcagtgcctcatcccaggaaacaggttcgagtttgccgccacgctggcgacggatcatgggggttttcaggcgcggggtcaggatctgggtatcgttaatgaagtcccagccataataacccttcagacacagggtaccctggttggttttcccctgcgctgcctccgcccggacgattttgccgttatcgacgaccaggttgattttgcaaccacttgcgcaataggggcaaaccgtgacgacttttttcatcggtctcgctccagttaatcaaatcacgcatacgcgctctcgactacagtatgcatcttttatgccacattttatgtggggtcattccctgatattacgggcactatttattcaaaactctgacgaaaaacaggctgtcgtcagttttgacgtgacgaaacgaaataccgcgtgacagccatcacgcggcagacattttattttttctcgacgacgggacctgcctgatacccgccgcccaggcttttcatcaactgaatgctttggatcacccggcggctgtccagcatcagtaaactcatctcttcggcaagcactggcaaccgggcttcggtggcctgtaagcggctggttaagccgcgctgataggcggcctcggcagcgcgctgggtaaagcgcgtggcttccacgcgttcagcctgcatttctcgctcgtcgttgagcgtttgcagacgcgtgccgttgacggcaacgtcacgcaccgcgttcagtacactctggttgtaacgttcaatcatcatgttgctggcggcgcgcgtgccttcgagattggcattcaaccgtccaccgtcaaacagcggcaatttcagacccgggatgaagttgaactggcgactggtttttttgaataaggtatgcagatggatggagtccagaccgaaaaacgctttgatatcaaagctcggatagaacaacgcccgcgcggaatccacctgatctaaactcgcctgaacataccagcgcatggcttgcagatccgggcgtctggcgagcaactcataagagagtgtcgccggaatgccggtctggacttgcggtaatgccaccggtctgatctccggcatatcgctggctcccgcgccaatcaatgcacgcagagattctcgcgtttcggtgatttgccctttgacggcaacaatttgtttatcgaccgccagaatctgtgcccgcgcgccgtggaaaggcacttgcgcttccagaccgtgcgccactttactctggtgcgctttcaccgcgtaatcaatcacatcgtgagtttgttctaacagatcgagcatctgatagctggcctgcatactgtaataaagctgcgctacgcccgtggccaggcttagctctactgctgcggtttctgccagcgcggcattatgcgcgccaatggcggcggcaaccgcactgcgatgcacaccccacaaatcaagatccagtccggcaaacaaacctactgtggcttccgtatagtacggcccgtccatacccagtgctggcgcatccatactataagggcttaaaaagccgttcgcgctgacacgttggcggttgagcatccctaacgctgcgacctgtaattgactaccggcatctaacaaatcggcctgggactgcgctttttcttcccgcagtttcgcttcggcgagggtgtgactaccacttagcgtccgttggatcagcgcatccagctgcgggtcattgagttgtttccaccactgcgcctgcggccagccggagctggcaagatgaatatcgtcggccagtttgatttgttccggtttgagctgttgatgaggtgcagaatccttacgtaccagggcacagccggaaatcagcgtcgtgctgccgagaatgctgcacaacagcagacgactaagttgacgattgatcattgcgtggctccttgtgcctgttccgtggcgggcgttaatgccggggctgtccagtctggcaagcgggcgaaaagctggcagacgtgttgctcctgttttaataaggtgggcaggatggcctgagaggcgggtgtctcttcaagcgttatttgaggagaacggctgagtgcggttgccagaccggcagcgtatttctccagggcgtcggcaaactgacctgctctgtccggctgtagtgcgttatccagcgcctgcgcgctgttccaggtggcatcccaggcgtgaagaagatcgcggccctgacgaataaccgtttggctacgttcaatcagtaatgcgcgttcttcgctgtccagttgacgctccagcgccacgcgttggcacatctcttcacaggcattaaacgccgcatgcagaccgatacgaatttgcagataagtgcgcagagccgtgacttcctgctggcgtgggatccgcattactttacttaacatacccagcgtgccagccagtttttgcggcagtgtgcgcgcttcactttcaggccagacaaaggtgtaaatcaccgcggacaccacggtaccaatgatgatacccagggcgcgatcgcgaatttccaccaggtcgtacactgggccaaaaacgttttcgagcgtggcgagcgcgaaggtgaccaccatctgtgtgccgatataagaagagcgttcagagctggtggcaatccatgcgcccaacaggaaaatcggtgccagcacaaacagcaattcgacaatattgtccagccagggcatgaccagtagcgtgaataacagcgccagaatcgcgccgcaaaaggccccgccaaaacgcagcaccatcttctggtagctgctaccgacatttgggttagcgacgatcacgcatgtcagcatacaggtgtgaatgccttcccagtccacgccgctgtaaaaggtgtaacagatcaaacaggcgagcagcgtttttaccgcgtagcgcatatagtctggattggtaaaagcatcggcggccatacttggcggtttggctgcgggcgttggcggcgtattcgggtccatctgacccagttgtaacaacgtctggcagatattctccaggttacattcccgtgccgccatcgcttcactttcactgatccgccagtcgctttgccagcactgaccttcagcaacggcatgctgcagcttgttgatttcactagctaatttttgtcggaattcaataattgcctgagaatcagcaaaagaggtgggatcgtagcgattcagcgtgctgtaaatgtaggttaccgttgccacgcagctttgccaccatgcgttttgagttcgccagttggcatcgtccgcgaggcaaaagacattgagtttttgtagcgccagcgcctctctttcaatccgcgtttcgggtagcggtgcgaggctgtctgtcaggtgactaatggcatcatcaagccgatcattaagcgcctgatgcatttggctaatggcacgactgggaaaccacagcacgccgattaacgtcatcagcaaggttggatagaggccaacaacgatacaccacagcgttaagcgcacgaccacttccggatagtcgagcatggcggggaaggtttgcccgtaaatagcgacaatggcgacggcgaaaaagaccagccccaagcgatgggtgcgcatcaaaaacatgcagcccatcaggatcggtccggcgatgatcaatcggatcaacggttcgccgtaactccatttgtagatcaaaaacaggctgccgatctccagcaccgtggcaaccacaaacaagatcgcgacaaatttggtgtaaaacgcgttgctctgaataccgtaaaacagcactgccaggcttaacgccacaaaagggatctcaaaggtcatgctgatcagaatcaccagcaggcagcctacccagagttgcacggtctgcggcacgcgacctggtcgccgctcgcttaactcttcatgaaagaacgccagcagcctgaccaccggtaatggcagggagttgagcgcgctcattattgcggctcaagattagcgactgcgctagcgccgatgcggaacatttccgggtcaggtttatcgaccatgattttgaccggaaaacgctgggcaacgcggacccagttaatagaacgagacactttcggcaggccgcccagcaccaggccgccgtcatccggtagcacgccgtagccaatgctatccactttaccctcgaaggttttgccgctgtcactcatcaggcgaatcgttgcgggtgtaccactgcgaatatttttcagatcggtttcgcggaagttggcgatcacataccagtgacgagtgtcgattagggtaaaaatagggcgcatggcagaagcaaattgcccgacggaggttttgagggaaatgacccggccatcaaacggcgcgcgaacggtcgccatttccagatgcagtttggtcagggcaatatccgcttcgaccgccgcacgctgggcaactaatgcatccacgccgctgacggcgctggcggcactctgcgcctgtaacaatacggcattaagatccgcttctgcggcgcgctgcgccgttcttgcacggtcaacatcttccgcactgacaaaaccttctttcagtaatggctcggtgcggcgtaatgtatctgtggcctgtttcgcggcggcacgggctttttctatcgtggcattaacgctgtcggcaccaaactgttgcgcgtcaacgctacgctgggtgagcataatttgcttatccagcgccgcgagggaggcttcagctttcgccagattggcttcgtacgggcgcgggtcgatgcggaacagcaaatcgccctgtttgactgcctggttgtcggtgaccgccagttctacaatgcggccgctgacttccggtaccacatcaatggtatctgcactcgcgtaagcgtcattagtacttggcgcactgtctacgcgccagataacgaaaacaagggcaaccagcgccaacgcaaccactaacagagcagggaatttactgcgaggagcttttttcggcgtactttccatgagcgcgtctcaaatagattagaaaaatgccagccagaacagcatggcgtagagagcaaaaagggcggtataaataattccgacaaatgccagattgatatttgcccgctgaataactcgcctcgtgatgagcgtcaaaataaggctggcaatggcgcagaaaaaccagctgggataataagcgccgatcaccgggattgccggagataatgagcatcccgaaaccatgaagacgggaattatccaggctgtttttttgagttgcatcgccatgcgagagagaactgttggcatattaaatacatcctgtctgctgcgaacaatatctgtagtgaatatcaatatccattgaaggcgtcagtatggctattttcttgatgaataaaaatagctttattcagccaccgcattcataacttatatattttatttattaattggctgtatatatttttaaaataaatacttttgggggcttcagcgcccccaaaagcgagtgacattaatttggggttacgatattcacccacaaatcgaaattatccagacaggcgataatttcttccagtttcgcgccattgccaataattttggctttcttcgcttttaccagatccgccattttggcttgtccggtcagcacggcgtgcagatcttcacggctgatgtagaaagaggcgtcggcttgcggttgcagcgttttccggtagttaagcacgctatcgttcagcgtcaggttgaggttatcgccgttgctcatattgaagttcaggctgatatttttacccgcagctttcgcgctatcgaggcgaacggccataaagtcgaacagcatttcgacgctcatcccgcgaatggtgtccggggaaccggtggtgccgtggctgaacttatgcaccccttcgcgcagctctttcgcgccggtcaggtagaaaccgcgccatgtggcggactcggcctgatagcccagctgttcaaagttattcgcttgcagattcttcgcgacctggtcacccgggttggcggcaatcacctgtttcagcagttctgcgctccagcggtaatcaccttgcttgttcgcttcttgcgccaggttgatgacacgggcagaaccgcccagcgcctgcacgtaacgtttacccatctccacctgaccatacggatgcaggttagccgggttaccgtcgtaatagccaagatagaagttatacaccgcgcgggcgttgtggctgacagaaccgtaatagccgcggctggcccagttattggcaagtgcaggcggcagcttaatcatgtcgccgatttcattcatggtgtagccctggttcgccaggtgcagggtctggtcgtgaatgtacttgatggtatcgcggtatttaccaatataatcattgatatgcttattgccccagaccggccaggtgtgcggcataaacagcacttccgcgtcgttaccccacatatccagcgtttcgttcagatactcggtccacttgctggtgtcgcgggttttcgcgccgcgcagagtgtagaagttgtgcagggtatgcgtggcgttctcggcggtacacagggctttcagggccggaatatagaagtgcatttcggctggcgcttcgctacctggggtcatcaggaagtcaaactccaggccgtcgataatcatcttctcgccagttctgacgatagttttcgtcggtgcaataatgctcgggtcgcccgttgccagcgtcacgccaaggccattacccacattgccttgcgcgttgtgcggcagtaacagaccgtaagagtagagcgcacggcggctcatgatgttacccgccagcacgttttcgctgatggcttcgtccataaagcctgcaggggcaatcacctgaactttgccggatttaacatcggcttcagagataatgcctttcacgccaccatagtggtcggtgtggctgtgagtgtagataacggcaacaatcggtttttgcggacgatgctggaagtaaaggtcaagtgcggcttttgcggcaggcggcgtcaccagcgggtcgataacaataatgcctttctcgccctcaacgaacgtaatgttagagatatcctggccgcgcacctgatacattttatcggtgactttgaacaggccagaaataccgttgatttggctctgacgccacaggctggggtttacggtttccggcgctgcggcattaatatcaaatttgtaatcgtccgcgcggtagtaaactttaccgttcgcatcacgcagaataccttcatccagcagcggggcgataaatccacgctgggcatcgtcaaaatcctgacgatcgctaaacggtaaacttttggcgtaattctgattaacctgttgggtatattgagtggcggctttcgcttcctctttcgcgttagcggtatttaccatcatgccgctggcggcagttaacgcaataacaatcctgctcaaacggaataaccgagagttattcatataaatctccatttatcatttatgtcgtaaatatgtaatccatgcaaaatacgtcatttaaagctggcgttatcataattgggaaattgcgactttaataagtggaagtgtgagcggaacgcgccattttattaggcatttgtgctgaagagggaaaattacagtaaaactatcattgcagaaaataatatgagtcgttttatgtgtttattatatatattgtacctgtcgttggcacagcgggacattgcgctactgtgccaacgttttactcatggggctttagcacagaactgtggcaaaaaacgttgatgcgccaatattgctgcaccctgagcgccattaaagtcagaagaactggcggcaataaagcgcacgacctgatgcggcagtggacggcgcaggtacttttgggtcatggcaacgagagtctcgcgtgggaaggcgggcatatccatcacgccaccgcccaggatcaccgcatcgggatcgaacagattaatgctggtggcaatggcccgtgccgcgttttcaagcagactctggacgaaaggggcgttttccgcatggacgaaaagatcgcgcaatgggtaatttcggggctgttgttcgtaccagcgtcttagcgccattccagagcaattggtttccaggcacccaggattgccacacgcgcagtgttgggtcatatctcccagggggatatgacccagttcgcctgccacaccgtgtgcacccgtccacggcgcaccgttcatccacactgcgaaccccatccccgtaccgagataggccgccagaaccagttgttgcgtaaggcggttttctactacgtcccaggagagttgcaggttaacgtcgcgggaaaactcaaccggacaattcagcgtattttcgagcttatcggcgagatcatataaatccgccgctgttaacggcaggttaggcgtagaaataatggtgcgtttatctttactgaccagcgccggaaatcccatcaccagaccatgacagcgagcgttaaagcgcctgagttgctcgtcaatcatttcgccgataccgctcaccaggccgggagcaatgacttctgcggtccgctttttttcgcagtgtagcgtttcaccttctgctgtccgcagacaaaagcggatatgcgttgcccccatatccacgcccgctacgacgttatgctgtttttgcatgaggctgtacctcgctttttgcagccagaatctgcgcggtcataattctccatgcttcgtcgatattttccgcatgattaaacaggccggaagtgccgacgataaagacatccgcccctgccgccatcagtttttcgtaagttgcctggttgcaggaaccgtccacctcaatttcgtactccagaccttctcgttcacgccatgccttcagttcggcaagtttatccagcatttcaggaatgaacggttgtccggcaaagccgggatcgacagtcatgaccgtaattttatcggccttatggatatagtatttcatggcctcaactggcgtctccgggttaaggatcagccccactttcatgtcatgacggcggatttcatcaatcaggcggaacgcctggccgttgatggtttccggatgcagagtgatgaaatctgctcccgcacgcgccagttgagcaatgtaatcctgcggccgcgtcaccatcagatgacagtcgagcggtttagttgccagttttttaacctgacttacgaagaacggactgagtgtcagattggggacaaagtgaccgtccatgatatcgatgtggaagtaatcggcatggctgtcgataaattcgatctgttctttaaatttcagcagatccatacacattaagctgggggagattttcatgttcaattccttacttactgataagacggtcaagggcgacagccgcgataattaatccgcccatcaccaccagttggtaataggtttgtacctgcaaaatattcagaccgttgttgatggtgccgatgatcaacccgccaatcaccacagagaaaatgcgccccttgccgccgaagaaactggtgccgccaatgatggcgctggcaatggcataggtttcaaaacccataccggcaagcggttctgcggcaccgagtcgtgcagtactgacgacgcctgccagacctgcacaaacaccggagatgataaacaccaccaggatgtggaatttcacgtcaatcccggaatagaacgcgctatttttgttgccgcccagtgcgtagatgttgcgcccgagccgcatacgcgttgtcagaaaccaaaggatgagcgcgacaattagactgaagataacggggacaggtatcccaattacgctggcggcaaagaagttcacgaagtcaaaactgaagccgtatacgctgttggcatcggagatcaccagcgtgatcccacggaaaatcgcgttggtgccaagggtgatgatgaacgggtgtagccccgtccagttgaccaggcagccgttgatcgcccccagtgcgccgccaaccagtacaccgccaatcatcgctgcgagaaacgggtcaacacctgccaacatcagtttggcggtcaccataccggaaagcgccagaatcgcgccaacgctgaggtcgataccagcgaccaggatagcgaaaaactcgcccatgccgatcaataccgtcacggagctttgaataaaaatctgggtaatattattggtggtcagaaaatattctggactcaggctaccaaagatggcgacgatgatcgccaggataaaaaaggtgccgtatttatcccagaacagcgcaaagttgaacggtttcttctcgctcgcttcgctttttactcttgtggtaaagcccatgccataatctcctcttcgctcatgtcatcgcgattcgtcaggatttgcgtcagtcgtccttcgcagaacacggcgatgcggtcgcagacggtgataatttcaggtagttcagaactcaccatcaggatgacttttccgtcgtccgccagttggcgcatcactttgtaaatttcggctttcgcgccaacgtcgatgccgcgggtaggttcatcgaaaataatcacttccgggcaacagcacagccatttggagatcaggactttctgctgatttcccccggagagttcggtgatattctggtttacgctatgacatttcagcgccagcagttcgcgttgattttcagcggtacgttgctcgtcaacttcatgaaacaagcccatcgcgcctttatagccgccgtctttcagactgcggctgatcgccatgttctgagcgatggaaaagttggggaaaaaaccgttatcccggcggctttcagtgatgtaagccatcccttttttcacggcatccaggggactacgtggagagatatctttgccattaagacggatttctccgccagcgcgtttatccacgccaaacagacaattcatcagttcagtacgtccggaaccgaccagtccggcaaagcctaatatttctccccggcagacgctaaaactgatatcccggaccttttttctgtcacgactggtgacgttccgcacctcaaaaaccgtttcgtgcgcaaggttgctgacattctccttcatcgcgttaaaacggttttgcagttcgcggcctaccatcagacggacgatatcgtcattactcacatcgcttactatgccgctgcaaacgctgctgccgtctttcatcaccgtatagcggtcgcaaatacggcgaatttccgccaacttatggctgatatagacgatggccgtaccctctttacgcaactgattcatgatcagaaacagatagtccacctctttattggtgagactggaggtgggttcatccatgatgatgactttggcatcgagcatcagcgttttggcaatttctagcatctgcttgtggctgatagataaattcgccactttctcatctagatcaactttcaagcccacgcgtaataacatcatggcggcgcggacacgcatttctcgccagtcgataatattgacgccacagatttttttcgtcagatgacgaccaatatataaattttccagtacggttaattcatcaataacgctgagttcctgataaataatcccgataccgagttgtgccgctaatttatgatccagcttgttatagctaatgttattaatggtaatggtgcctttggtcggctcatgtattccggataaaactttcattagcgtggatttacccgcgccattttctcctagtaatgcatgtatttcaccaggataaaccgttaaattaacgctctttaatgcgtgaaccggaccaaaggacttgccgatccccgccatgcttatatatggcgtggccataaataacctctctgcacgaaatatcgtattattgcctgatggctacatttatcaggtctacgttcaggttattttgttggccggataagacacttcattagcatcatcatccggcatcattcagttttattgagtgaccaggatactatcgaccagtttaaattccggtgctttatccagcgggataaccttgccggatttctcagcgtcaaccatcagcttcagacccgttgcgccgatatccgccgggttctgggcaaccgtcgcggtcatttgtccggcttccaccattttgcgggcttccggaatgccatctgtaccgacgaccagcacttttcccgtttttccggcgtttgcgactgcctgagcaacacccattgccatcgtgtcattcgcgcaatagatcgctttaatattcggattacgttgcaacacgttagtggcgacatccagtgctttaatgcggtcccagtcggcaggctggctggcgacaagcttgatctggcttgcttttttgaaggcttcggtggcaccattacgacgcgcttcaccggaggcgttaccggctttaccctcaatgattgcgacttcaccaccttcagcgcccaatttgtcaataatgaagctcgcgcctttcgccccgacagcaacgttatcggtggtgacaaaagcttccacattgccgccagcttttttcagattatccatgtcgattttttcatcgagattaaccagataaatgccttttttccatgcgcgggcgacaggcatgaccagattcacactggataatggagcgaaggcgatacctttgtaatttttattactgagatcttcaaataactgcaattgagattgaaaatcgccttcactaggagaggcaaaaatatcaacgctgacgcccagtgtttttgcttcatcttcaatgccttttttcatatctacccaaaatgggttggagagggttttcaatacgacagcatattcggcggcagcaaaagcgctggtactcaacattaagcccacgagtgtgccgctgaaatatttcagatatttattcataataatgttctcacggtaaggggacaggtaactccgcgatggcggaattacctttttcttatttcagcgcgcctggactgaagaaatcaacaattgcgccggttttttgcatattaatattagcttgttcaatgttgagctgggcgacagagacaaaaaaagcgtccagcaaagttagttgtaatattcttgcgctggcattacgacctaataacggcgtttccggggctggactgcaaataatataatcggccagtttcgctatcggactatggtagctatgggttatacaaataatctttgccccgttcttttttgccagttctacggccgcttttacatcactggttcgcccggaatgggtcactaccagcacaacatctccttcctgtaacaagctagcggacatcatcatgatgtgagcatcaggataggcctgacagcgtacgccaatgcgcaagaacttgtgctgtacatcagcacagatagcattacttcctccggcaccgtacaaatcccgctgtctggcctgatagaaaaagcgggcggcacggtggatctcatcaacgttgacgatgctctgaccttccataatggtgcgtaaagtgatgttaaataccttattcaccacatcctgcggcgcttcatcaaaagccaactcggaaggcaatacctgttcactctgagaaaaataatcttccagcgcactgcgtaagttacgaaagccgctaaaccccagcagcttacttaccttaactatcatcgcttcagataccgccagagcttctgcgacatctttaattgcgggtgcacaactcaggttaccgggtttgagtaaccactccacgatgcggctttcattttctgtcattccttcctgcttcattcgcaggtaaggcgctaaccctataccgttcggaagcgcactatcaaactcactctggctcatcacgttctcttgtccttgaattgaagacgccactatatcaccacagcaagaacagaaaagatgctggcgacttcacaaaaaaataaaatttataaagtttattttattgtgaacaatggcgagtggcttaaaattttatttcatttaattagtttaaaaacatgatgttatttgtttttctggttttttagatgatagatgttgctggatggtgagtgtctttaacgctattgcgctgtcagatgtaactctgtaaaacagatcaggaaggcgtaattcatcgattttgggtgtttttaattcattaacatcacaaatgttttttgattgtgaagttttgcacggacggggaagatgaatgaaaaagattgcatttggctgtgatcatgtcggtttcattttaaaacatgaaatagtggcacatttagttgagcgtggcgttgaagtgattgataaaggaacctggagcagtgagcgtactgattatccacattacgccagtcaagtcgcactggctgttgctggcggagaggttgatggcgggattttgatttgtggtactggcgtcggtattagcatagcggcgaacaagtttgccggaattcgcgcggtcgtctgtagcgaaccttattccgcgcaacttagccggcagcataacgacaccaacgtgctggcttttggtagtcgagtggttggcctcgaactggcaaaaatgattgtggatgcgtggctgggcgcacagtacgaaggcggtcgtcatcaacaacgcgtggaggcgattacggcaatagagcagcggagaaattgagattcatccactacttgcatggatgagtaatgattaatgtggatagagtttctttttgaggttggctaatgaaacgctttccgctatttcttttattcaccctgctcacgctgtccaccgttccggcccaggccgatattatcgacgacaccattggcaatattcagcaggcgattaatgacgcttataaccctgaccgtgggcgagactatgaagatagccgcgacgacggctggcagcgtgaagtgagcgacgatcggcgcagacaatatgacgaccgccgccgccagtttgaagatcgccgcaggcagctggacgatcgccagcgccagcttgatcaggagcgtcggcaactggaggatgaagagcggagaatggaagatgagtatgggcgatgaggttgggtatggagcaggcatcgcccctcaccccaatggggagagggagaaaacgagcgcaatattcaatatcgagcacaatcggtcccctcgcccctctggggagagggttagggtgagggggccagcgcgcacattccctctcatcacgccaccccaatctccatcccatcaaaccccacctcaaacccactcggtagtgcgttttccatcagccacgcatcaaactggtggctgatatgggtcagaatcacccgtgggctgcggataacctgattcagcgcaagcacggtatttaaatcacagtgattacgcggtgcatccgcgcgcggcgggtgactgcaatccatcaccattacctgcggctgattattgcgtaaaaatttcagcgttttttccggcaagcctgcggtgtcagacagccacgccacccggctgtgtgccgtttccagcagataaccgaaggtcagtttactgtggttgagcggcaggggcgtgacctgtaacccctgcaaatcaaacaccacaaacggttccaccgtgtggctgaaatcaagcaggcccggatgtttaaacagatcgtcgcagccctgttcatccggcgggccgtaaaccgggatcggatcgccaacgccccagcgcagcggaaacagcccctggacgtgatccatatgataatgcgtcagcaaaaactgctggaagcttccggggctccagcgatcggcgagatcgtgcagcccggcgtcgatcagggtgattgcgtcgttaaacttcactacgccgctgcacggttggcggcgatactgcgggctgcgccgcgctctggcgcaggccgcacactcgcagccccatgccggaacgccctgtgcgccgccggtgccggtgagcgtgagggtcaggctcatgttacagcgccttggtgaagcggaagtggctctgctcgtagccttcgcgcagatagaaacggtgcgcgtcgtggcgcttcacgttggtgctaagttcggtcatttcggccccggcctggcgggcttcttcttctgcccacgccagtaacttactgccgacgttcagaccgcgcgcctgcggcattaccaccaactcctgaatttcgccgatccagttgacatgatgcagatgaaactgcaaatgcaggccgatcatgccgacaacttcgccatcaagcagcgccagatggtagcgcatgtttgggtcgcgcagattggcgttaaaacccacgcgaaacgcgtggtggtcaaactccgcctgttttagctcacaaatcagcgcgtaaaccgcgtcggtgtcgtactgcgtggccgggcgaagctcacaagcaggcatggtgtttctccttctgatggatcagcgtcagcagcgtgtcgacgctctggcgcaggctgccgtcattgttgagcgtatggcaatcctgtggagtatagcgggcggcgcgcgccaggcgggcgttaatttcactggcgttttcacggccacggttttccaggcgctggcggaggatctccgggctaacctgtaaacagacgggcagcagcgcgctttgatagcgcgcccgcgcctgcggcagatgggcgcgactgccgttgaccagcacgtcgaatccggcgtgcagccagagatcaatctcgacgccgacgccataatacagaccgttagcgtgccagcttaaggccaacagattttgccccgcgcgggtaaaaaactcctgctcgctcagggcgatatggttttcacttccggcgctggcatcgcgcgtgatgtagcgatgcgccaccagtaactgagtttgttcccgcaggcggagttccgccagcaggctgtctttcccggagccggacggccccattaaccaaatcagttttcccatcatcagaacacccttttaccctgacgccagacgtggtcgatatgaatatgattgtccttgcgatgcgccagcaccaggtcggcgcgtttgccctcgccaatcaccccgcgatcctggagattaagcgcctgcgctggatttttagtcaccagcttcaccgcctgcggcagcgtaaagcggttgctctggtcatcggcgacgcgaaatgccgcatcgagcaggctggcggggtagtagtcggaagagaggatatccagcaggccaagctgcgccagttcactggccgccacgttgccggagtggctgccgccgcgcacaatattcggcgcgcccatcagcacgttcatgccatgcttgcggctggcttccgccgcttcgaacgtggtgggaaattcggcgatcacgctgccaagctggtgagattcagcaacgtgggcgtgggtggcgtcatcgtggctggcaagcgcaatttttcgcgcgcggcacagggcggcgatggattcgcgattcggctggctccagcgtgcggcgagcgccagttgctcttcttcgtactgctgcatctgcgcatcagtgagggagtatttgccctgataatattcgcgatacttctcgcggttggcgaactggcgctggcccgggctgtggtccatcaggctcaccagcgtcaccggctcgcgctgcaccagtttttcaaacagcggcagcgtggtgtgatgcggcagttcgcagcgcagatgcagacggtgctcggcgcggttgacgccgcgtttctgcgtctcttcgatggcgttgatcatcttctccagattctccagccgatcgccgccgtcgcgcacgtcgccaattgccacggcatccagtacggtggtgatgccgctcgccaccatcagcgcgtcgtggctgctcatcgcgctgtgggcaggccagtcaactttcgggcgcggggtgaagaatttatccagattatcggtatgcagctcaatcagccccggcagcagccagccgccttcgccgtccatcgcctccggcaggcggctctggctttcggcaaaggcgcggatttcgccgttctgcacctccaggctaccgcttaccacctcgttttccagcaccagcttaacgttattgataatcatgaagaggctcccattgggtgttagctcaactagaggctcccattgggtgcaggcggtcggcgacgtcattacgtacagcttcgtcatggaagatgcctacgatggctgcgccacgggttttggcttcgcgaatcagttccaccaccgcggcgctgtttttggcgtccaggctggcggtaggttcgtcaagcagcagaatggggtagtcgacgataaagccgcgggcgatgttgacgcgctgctgttcgccaccggaaaatgtgcttggtgccaggtgccacaggcgttccggcacgttcaggcgggtgagaagacgcgcggctttagcggcgcaggcttcacgcggaacgccggtatcgagcagcggctgcatcaccacttccagtgcactgatacgcgggatgacgcgcagaaactggctcacccagccgacggtggttttgcggatttccaccactttgcgcgctggcgcggtgaccaggtctacccactcgtcaccgtgtttgatctggatttgaccttcgtcgggcagatagttggcgtacaggctgcgtagcagagtacttttgccgctgccggaatggccgtggagcaccacgcattcgcccgcgttgacggtgaggctggcgcgattgaggacgggcaggcgcacgccgttttgctggtgcaggatgaaggttttactgacgttttgtacgttaatcatttttcgcctcgtggttcgggtgtcggatgcgacgctgacgcgtcttatccgacctacggggagcgcatttgtaggccggataaggcgtttacgccgcatccggcaccggctcaattctgcaaaacgctactcaccagcagctgtgtatacggatgatgcgggtcgtcgagcacgcggtcggttaacccactctccaccacttgcccctgcttcatcaccagcaaacggtccgccagcaggcgggcgacgcctaaatcatgggtgacaatcaccaccgcgaggttcagctccaccaccaggccgcgcagcaggtcgagcaggcgggcctgcacgctcacatccagcccgccggtcggttcatccataaacaccagcttcggatgcgtcaccaggttgcgggcaatctgcaaacgctgctgcataccgccggaaaaggtggtcggcaggtcgtcgatccggttggcgggaatctccacctcttccagccacttctgcgcggtggcacgaatatcgccgtaatgacgtgccccggtcgccatcagccgctcgccgatattgccgcctgcgctcacctggcggcgcaggccgtcgagtggatgctgatgcaccacgccccattcggtacgcagcaggcgacggcggtcggcctcgctcattgcatacaggctacggttctcgtagtgaatttccccctgctgcggcgtcaggcgcgcggagatgctcttcagcagcgtggtcttcccggagccggattccccgacaatgcccagcacttcccccggccataaatcaaaagagacatcgctaaagcctttgcccggcgcgtaaaggtgggtcaggttattgacgctaagtaacggttgattcattggttttttgcctcgctctgttggcggcaataatcggtatcggagcagacaaacatgcggtttccggcgtcatccagcaccacttcatcaagatagctgtgggtgcttccgcagatggcgcatggctcatcccactgctgaacggtgaacgggtgatcgtcgaaatcgagactttccacgcgggtaaacggcggcaccgcatagatgcgcttctcgcgccccgcgccgaacagttgcagggcgggcatcatgtccatttttgggttatcgaatttcgggatcgggctcgggtccatcacgtagcgcccatttaccttcaccggataggcgtaggtggtggcgatatgaccgaagcgggcgatatcttcatacagtttcacctgcatcacgccgtactcttccagcgcgtgcatggtgcgggtttccgtttcgcgcggctcgataaagcgcagcggctcggggattggcacctggaagataattatctgatcttcggtcagcggcgtttcggggatgcggtgacgcgtctggataaccgtcgcatcgtccgtacgttccgtggtgtttaccccggtcacgcgcttgaagaagttgcgaatgctcacggcgttggtggtgtcatccgcgccctggtcaatcaccttcagcacgtcgctttcgccaatcacgctggcggtaagctgaatgccgccggttccccagccgtacggcatcggcatctcgcgcccgccaaacggcacctgataaccggggatcgccaccgcttttaagatggcgcggcggatcatgcgtttggtctgctcgtcgaggtaggcaaagttgtagccgctcagattagccatggttctgctcctgttgcagacgtttgagtagctccagttcggcctggaaatcgacgtagtgggggagtttgaggtgactgacaaagcctgcggcttcgacgttgtcggcatgtgccagcacgaactcttcatcctgcgccgggcctgtcgcgtgctcgccgtactccggggcttgcagagcgcggtcgaccagcgccatcgccatcgctttgcgctcgctcatgccgaacaccagcccgtagccgcgcgtgaagtgcggcggctcacccggcgggtcgataaaaccgttaaccatttcacactcagtcatcagcagttcgccgacgttcaccgcaaatcccagctcttccggcacaatgctcacgtcgatatagccgctgcggatctcgcctgcgaacgggtgattgcgcccgtaaccgcgttgggtggagtaggccagcgccagcaaatagccttcgtcgccgcgcatcaactgctgcaaacgggaggagcgactgcaggggtaaaccggcggcgtgcgggtgatgtcatccggctgtgcgccgctatcctcttcaaacttcgccagcccctgacgcgccagcaggctgaaaacgtgcgggctcggctgctgttcgctgtcggcggtggtcagcgtcggcgcttcgccgtttgccagcagggtaaaatcgagcaggcgatgggtgtagtcgtaggttgggccaagcagctggccgccgggaatgtctttataaacggcggagatacggcgttcgagacgcatcccggtggtgtcgagcggctcgcttaccgccagcttcgccaacgtggtgcggtaggcgcgcagcaggaaaatcgcttcaacgttatcgccgctggcctgtttcagcgccagcgccgccagttcgcggtcggcaatgccgccttcggtcatcacgcgatctaccgcgaggttaagctgctgttcaatctgggcgacgctcagttcgggcaaatcggtatcgcctcggcgtcggctctcttgcagggcgtgggcggcgtcgatcgccttctcgccccctttcacggcaacgtacatcagcacacctccacatgagtggttcgcggaatagccagcaggcgctcgccacaggtcaggatcaggtcgatgccgagcgggaacggatgcgggcgctcggtgagttcgtgcagaatgcactccggcagctgcggagcgatcattcgttcttcggcaatacccgcaccagtaaggcgcaacatgcgtccgccgctcaggctggcgacctgtaaaatcagcgtcgcacccgcttccggcgcaacggcggtgccggtggaaagggcgttgagctgttcgctggaaatcgcctcatccgtcaccgcgaaggtcgcctgttccggctggctgaccagcggcgcgttggtatgaaaacgcaggctctggttgacgatatcgttatttaatggggtagaaagccacaccggcgtgtcgttatcggccagcgtcagcagcacgctggtggtggcgatattcagcggttgccagccgcgtttgagctgatgcagggcgacaatcacgcccggctcgctcatggcctttaacaggcgacgaaaactgtgctgggcatcctgcacgggaagcataaaagcggtttccagggtcatgcgttgtctccgcgaaccatcgtaaagaagtcgacccggctggcgttcacttcggcctggcgtgcggcaatgcgtgccatacggtcagcgtccagcggggcaataagggtttcacttaagttttgaaagtggcgagattgctgcatcagcgcgtcaatcagcgcgcagcgttcggcgtgctgtttatcacgcccctgcacccagctgtagccgagcgtgccgtcagtcaggcgcacggcggcgcgggtcagcgtggcgtcgccggcaaaaaaacgttcgccggtgccgcccatccgcgcctgaatctgtaccaggccagtttcagcggcgcggatcacctcatagtcggcggtgatgtttagcgcgttcaggcgtgctgccagttcagccggttggctgtgcgccagcacggacatccagtgctggcgggtcgcggtatctgcgtgcattcagtgctccatagtgaattcaatcatgtcggcgcgcgtcaggctgacggagtactccgccgggctgctttcaccgtcacggtggttaagggtgcgcacgcacagcagcgggctcatattcgggatttcaagacgctggcactctttggcctgggcgcggcgggcgctgatccgcgtctggctgcggcgcagcgcaattccggtttgctcgcgcagaaaatcgtgcaggctgccgctgtcgaagcgttgcagcgtcggccagagggtgaggtccgcgaagtagtggtcgattaaacagagcgcgacgccgttgacacgacgcagggtgcgcaggtggatgacgttctccccctcggtaatccccagtgcgtcagcgacgtggccggacgcggggcgcaatacgctaagcagtttttcgctggtgggatggctgccctgatccagcagattctggctaaaacgcgcctgggcgttgagcgggtaatcgaacgggcgcatcagcaccagcacgccgacgccctgacggcgctgtacccagcctttttccaccagttggtcgatggcgcggcgcagggtgtggcgattcacctcaaagcgcgctgccagttgctgctcggcgggaagatagtcgccgcagcggtagtgttgacgaagctcctgctcaagttttgcggctatctcttgatagcgtgttgggtagctggtcggatgtgtagacaagtgcatagatatcaatgcctcgcttatcagataaagtgcttacgcaaccgttgagagaggaaatccagcaggctgaccgtgacgatgataagcaccatcagggcgcaggtttgttggaactggaaaccgcgaatcgcttcccacagggtgacgccgatcccgcctgcgccgaccatgccgacgacggtcgccgagcggacgttggattcgaagcgatagagggagtaggagatcagcagtggcatcacctgtggcagcacgccgtagaggatctcttcgagcttgttggcaccggtggcgcgaatgccttccaccgggccgggctcaatcgcttccaccgcttcggaaagcagcttggagagcacgccggtggtgtggataaacagcgccagcacgccagcacgccagcgaacgggccgaggccgacggcgaccacgaacagcatggcgaagaccatttcgttaatggcgcggcaggcgtccatcaggcggcgaacgggctggtaaacccaccacggcaccaggttttcggcgctcatcaggccaaaggggatggagagaaccaccgccagcgcggtgccccagacggcgatttgcagcgtgacggccatttcggtgaggtaatcctgccactggctgaaatcgggcgggaagaagtcggcggcgaacgtcgccatgttgccgccgtctttgatcagcgtaagcggggccatttccgcgccctgccacgagacgaccaacacggcgagtacaacggcccagctcagaagcgagaaccagctgcgcttgggtggggcgatggtgatggtttgcatgtttggctccggtctgtaggccggataaggtgcttgcaccgcatccggcatcaacgcctgcacattgtcggatgcgacgccggggcgtcttatccgacctacgatttactgcaccgctttactcacgctactcatcgcgcttagcgcgttgttcaggcggtccaggtcatccagctgcgcctgaatctcggtggtttttgccagcttgtcctgctcattcagtcctttattgcttttcacgccctgcatctctttaaacagcgcgagctggcgaatcggcaccagttgcaggtcgctggaagcgcggaatggcgcccagcccaggcgttccagcaccgctttttcttccggcgttttgccgtagttcataaagaagtcgtagatcttgtctttggtggtttcggaaagattcttgcgccagacgatcggatcgcctgggatcagcgggctcttccagatcaccttcagttctttcagcttctctggcgcggaggttttcagcttgtcgaggttttcggtgttgttggtggcaacatccacctgcttgttggcgacggccagcgcgttggtttcatgcccggcgttgacggtgcgcttgaagtcgctggcggagatattgtttttggcgaagacgtagtagccggggacgaggaagccagaggtggagttaggatcgccattgccaaaggtgagatctttccgcttcgccagcagatcgttcaggttgttgatcggactgtctttgttgacgatcaacacgctccagtaacccgggcttccatccgccgcgaccgtctgggcgaagacctggccattggcgcgatccaccgcttccatcgcgctcagattgccgtaccaggcgatatccactttattgaagcgcatcccctggataatgcccgcgtagtccggggcaaagaaggcgttgaccttcacgcccagcttcttctccatatcctgcaagaacggcgtccattgcggtttcaggttttgctgactttccgtactaataatgccgaaattcaacgccttttcctgctcttcggcgtgcgccgggcttaacagggtgctgaggctgaacatgctggtgaaggccaggctggcaattatcttagcgttcattcgttttcctcaatgatggggatgtcaggcagctttcgcgttctcttcgacgcggttaatgctgcggtagagatggtcaaaacgttcgttatcaaactgttggctgctgccgtcgtagaagacgtgcccctggcgcagggcgacgatgcgttcgcagtagcgcagggcgtaatccacctgatgcagcgtgacgaccacggtgatgccgtcgttctggttgatgtcgcgcagggtgtccatcacgatgcgcgcactttctgggtccaggctggcgatgggttcatcggccagaatcactttcgcctgctgcatcagcgcacgggcaatcgccacacgttgctgctggccgccggagagggtggaaacgcgctgatgggcaaaatgcaccatgccaacgcgggtcagcgcctgtaacgcgcgctgtttctgctcgccggtgaaccagctaaaacaggtgcgccagaacggcgtgctgccgagcgcgccaatcagcacgttctccagtacgctcaggcggttcaccaggttgaattgttggaatatgtagccggtatgggcgcggcttttgcggatatcgcgggccaggcggccttcgcgctggactgtgcggcccagcagctcgatatggctaccgacagatttatcgccggtaatcaaaccgcttaagtgacgtaaaagggtggattttccggaaccgctcggcccaagcagagccaccatttcaccgtgatgaatgttcagatcaaccgcatgcagcgcctgatgctgattgaaggttttggcgagcttctcgacacggataatcgtttgcatgatgcagcctccctaaaaaagtggctccatcgtggcggattattgtgacgatttggttaattaaaagtgactaacagatgaagagttaacgggaattcgatgacagtgcgggagggcgggcctcccggcgggttattgcgttggttgttgtttgacgacattaatcatccacggtacgccaaatttatcggtgactttgccaaagccatgcgcccagaaagtttcctgccaggccatttcgatttttccgttagcggcaagattgtcaaaccagcgttttccttcttcgacctgttggctatcgagcaccagcgtaaagccggagtagctggcttttccactcggcatggcatcgctcatcatgatgtcgcttccggcaatgcgcacattggcgtgggcgatggcggtatcgggaaattgcattccggaagggcagttctcggcgctgtcctgcgcactttttggcatttcgccgaagctgattttatagagcagttccgcgcccaacgtacgttgataataggcaatcgcgtcggaacagttaccggcaaaagagaggtagggacttaacggcatgatggtgacctcagttaagagaagccagttaagtgtagttcgaaatttatacagatgagaggcggcctgataagacgcgcgagcgtcgcatcaggcagtcggcactgttgccggatgcggcgtaaacgccttatccggcctacggagggtgcgggaatttgtaggcctgataagacgcgcaagcgtcgcatcaggcagtcggcaccattgccggatgcggcgtaaacgccttatccggcctacggagggtgcgggaatttgtaggcctgataagacgcgcaagcgtcgcatcaggcagtcggcaccgttgccggatgcggcgtaaacgccttatccggcctacggatggtgcgggaatttgtaggcctgataagacgcgcaagcgtcgcatcaggcagttggcactgttgccggatgcggcgtaaacgccttatccggcctacggagggtgcgggaatttgtaggcctgataagacgcgcaagcgtcgcatcaggcagtcggcaccgttgccggatgcggcgtaaacgccttatccggcctacggagggtgcgggaatttgtaggcctgataagacgcgcaagcgtcgcatcaggcatctggcaccgttgccggatgcggcgcgagcgccttatccggcttaccgatcacaatacaatcagttctttttcacaaactcagatttcagtttcatcggaccaaaaccgtcgattttgcaatcgatgttatggtcgccttcaaccaggcggatgtttttcactttggtgccaattttcagcatgctagagctacctttcaccttcagatctttaatgatggtaacgctgtcgccgtcagccagcagattgccgttagcatctttaacgatcagctcgtcgctttcctgtgcaggttctgcgtcgttccattcgtaggcacattccgggcagatgtacatgccgttatcttcgtaggtgtattcggagttgcattttgggcagtgtggtaaactcatgtggatttcctcaaaagtcagcagggcaaaagcgccaaaaaacggcagattgccgaaaaaggccgcaattatacacaaaatccctgagtttgtcgggggtactgctgattttagacgacgatcgttttcatttgaaaggaaacgcaaaaagaaaataatctttttgcctctatttattatttaagataatgttaatgctctacttgttctttttttaattcacatgatatttttatctttctgacgttttaaacgtatcagaagacgttatttattctgataaaaaacaacacactaaatataaaattatttcttgcagtaattataaaagccgaaaacagaactcaaaaacaatctggctaaataaaataacaaaatttgctttaaggaagaattttctatgtacacacagaccctgtatgagttaagtcaggaggctgaacgcctgttacagctttctcgccaacagttgcagttactggaaaaaatgcctctctctgtacccggagacgacgcgccacaactggctttaccctggagtcagcctaatatcgccgaacgtcacgcgatgctgaataatgagttgcgtaaaatttcccgactggaaatggtgcttgcaattgtcggtaccatgaaagcagggaaaagtaccaccattaatgccattgttggtacggaggttctgcctaatcgtaatcgcccaatgactgcgctgccgacgcttattcgccatacgcccgggcaaaaggaaccggtactgcattttagtcatgtcgcgccaatcgattgtttaattcaacaattacaacagcgcctgcgtgattgcgatattaagcatctgaccgatgtgctggaaatagataaagatatgcgtgcgcttatgcagcggatcgaaaatggcgtcgctttcgaaaaatattatctgggtgcccagcctatttttcattgtctgaaaagtttgaatgatttagtgcgactggcgaaggcgctggacgtcgattttcctttttctgcttacgccgccattgagcatattcccgtgattgaagtggagtttgtccatctagcggggctggagagttatcccggtcagttgacgttactggatacccccgggccaaatgaagccgggcaaccgcatctgcaaaaaatgcttaaccagcagctggcacgcgccagcgcggtactggcggtgctggattatacgcaactgaaaagcatctccgatgaagaggtccgtgaggcgattttggcggtggggcaaagcgtgccgctgtacgtgctggtcaataagttcgatcaacaggatcgtaacagtgacgacgccgaccaggtgcgggcactgatttccgggacgctgatgaaagactgtattacgccacagcagatatttccggtgagcagcatgtggggctacctggcgaatcgggcgcgctatgagttagccaacaacggtaagttaccaccgccagagcaacaacgctgggtggaagattttgcccatgccgcgcttggcaggcgctggcgtcatgccgatctggcggacctcgaacatattcgtcatgctgccgatcagttgtgggaagatagcctgttcgcccagccaattcaggcgttgcttcatgccgcttacgctaacgccagcttgtatgctctgcgatctgccgcgcataaactgttgaattacgcgcagcaggcgcgggaatacctggattttcgtgcgcacgggttaaacgtcgcttgtgaacaattgcggcaaaatatccaccagatcgaagaaagtttgcagctattgcaactcaatcaggcgcaggtgagcggcgagattaaacatgaaatcgagctggccctgacctccgccaaccactttctgcgtcaacagcaagatgcgctgaaggtgcagttagccgccttgtttcaggatgatagcgagccgttaagcgagattcgtacccgctgtgagacactgttacagacggcgcagaacaccatcagtcgcgactttacgctgcgttttgccgagcttgaatccaccctttgccgggtgttaaccgatgttattcgccccattgagcaacaagtcaaaatggaattgagcgagagtgggtttcgtcctgggtttcattttcctgtttttcacggcgtagttccccacttcaacactcgccagctgttcagtgaagtcattagccgccaggaagcaacggacgagcagagcacgcgtttaggcgttgtgcgtgagacttttagccgctggttgaatcagcccgactggggacggggaaatgagaaaagtccgacagaaacggttgattacagtgtgttgcaacgagcattaagcgcagaagtcgatctctattgccaacaaatggctaaagttctggcagagcaggtcgatgaatctgttacggcaggcatgaatacttttttcgctgagttcgctagttgtttgacggaattacagacgcgtttacgcgaaagtctggctctgcgtcaacaaaatgaaagcgtggtcaggctgatgcagcagcaattgcagcagactgtgatgactcacggctggatttacaccgacgcccagctgttacgcgatgatattcaaacacttttcacggcagaacgatattgaccaagacgttacttgacggccccggtcgcgtgctggagagcgtttatccccgctttttagtggatctggcgcagggtgatgatgcccgccttccacaagcccatcagcagcagtttcgtgaacgactgatgcaggaacttcttagccgtgtgcagcttcagacatggacgaacggcggcatgttaaatgcgccgcttagcctgcgtctgacattggtggaaaaactggcgagcatgctggatcccggtcatctggcactgacgcagatcgcgcagcatctggcgctgctgcaaaaaatggatcaccgccagcactctgctttcccggagctcccccagcaaattgccgccttgtatgagtggtttagtgcccgttgtcgctggaaggaaaaggcgttaacgcaacgaggcctactggtgcaggcaggtgatcagagcgagcaaatttttacccgctggcgtgctggggcgtataacgcctggagcttgcctgggcgctgttttatcgttctggaggagttgcgctggggggcatttggcgatgcctgccgtctgggaagcccgcaagcggtggcgttgttgctgggtgatttgctcgagaaagcgacacaacatctggcagagagtatcaatgcggcaccgaccacgcgtcactattaccatcagtggtttgcctctagcaccgttccgacgggcggggagcatgctgattttttaagttggctgggaaagtggaccacggcagataaacaacccgtttgctggagtgtgacccaacgctggcaaactgtcgcgctggggatgccacgactctgtagtgcgcagcgtctggcgggggcaatgctcgaggaaatcttctctgtaaatttggcgtaaataatcagttacatcaatgagtcctaaacgaaatccatgtgtgaagttgatcacaaatttaaacactggtagggtaaaaaggtcattaactgcccaattcaggcgtcaactggtttgattgtacattccttaaccggagggtgtaagcaaacccgctacgcttgttacagagattgcatcctgcaattcccgctccccttttgcggccgtcgcgctgatttttctggcgtttgcggaaatgggccaactctgcgaggaaagctatgctgaaaaggaaaaaagtaaaaccgattacccttcgtgatgtcaccattattgatgacggtaaactgcgtaaagccattaccgcagcaagtctgggtaatgcaatggaatggttcgattttggtgtttatggttttgttgcttacgcattaggtaaagtttttttcccgggggctgaccccagcgtgcagatggttgctgcacttgccactttctccgttccctttctgattcgaccgcttggcggactcttctttggtatgttgggcgataaatatggtcgccagaagatcctcgctatcactattgtgattatgagcatcagtacgttctgtattggcttaataccgtcctacgacacgattggtatttgggcaccgattctgctgttgatctgtaagatggcacaaggtttcagcgtcggcggtgaatataccggggcgagcatatttgttgcggaatactcccctgaccgtaaacgtggctttatgggcagctggctggacttcggttctattgccgggtttgtgctgggtgcgggcgtggtggtgttaattagcaccattgtcggcgaagcgaacttcctcgattggggctggcgtattccgttctttatcgctctgccgttagggattatcgggctttacctgcgccatgcgctggaagagactccggcgttccagcagcatgtcgataaactggaacagggcgaccgtgaaggtttgcaggatggcccgaaagtcagctttaaagagattgccactaaatactggcgcagcctgttgacatgtattggtctggtaattgccaccaacgtgacttactacatgttgctgacctatatgccgagttatttgagccataacctgcattactccgaagaccacggggtgctgattattatcgccattatgatcggtatgctgtttgtccagccggtgatgggcttgctgagtgaccgttttggccgtcgtccgtttgtgctacttggtagtgttgccctgtttgtgttggcgatcccggcgtttattctgattaacagtaacgtcatcggcctgatttttgccgggttactgatgctggcggtgatccttaactgctttacgggcgttatggcttctaccttgccagcgatgttcccgacgcatatccgttacagcgcgctggcggcggcatttaatattagcgtgctggttgccggtctgacgccaacgctggcggcctggctggtcgaaagcagccagaatctgatgatgcctgcctattacctgatggtagtggcggtggttggtttaatcaccggcgtaaccatgaaagagacggcaaatcgtccgttgaaaggtgcgacaccggcggcgagtgatatacaggaagcgaaggaaattctcgtcgagcattacgataatatcgagcagaaaatcgatgatattgaccacgagattgccgatttgcaggcgaaacgtacccgcctggtgcagcaacatccgcgaattgatgaataagctgaaacggatggcctgatgtgacgctgtcttatcaggccaattgaactcttaaggttcacttaatctctgacgcgcatactctcctccaggttaacggaggagagtgcaatgaaaaaccgtgtttatgaaagtttaactaccgtgttcagcgtgctggtggtcagcagctttctttatatctggtttgccacgtactgatctttcttcagccgtacccaggcccgcgtgccggaagtctcttgccggttttgcaggaaaaactgcccgtgatgcaactgtgtaatgcggctgacaatacttaaccccagaccaatcccgccataacggctgtccatacgtacaaacgctttactcaactccccgcatttactctcatcaatacctggtccttcatcttcaactgccatgaccgctccgtcatcttcttgcagcttaatcataatgttgctgccttgcgggctgtaacgatgggcgttttctaccaggtttcgcaataacatccgcagcagggttgcatcaccctgaacggtgatgtcggcggcgctctctggcaatagcagggtttgctgtcgctggtcgagcatggtactgagttcgtcatagctggggagaatgacatcttccagcagttttacatgttgataattaccggaagaaaaactctgtccggcacgcgccagttgcagcagctgggagacgctctccatcatctgatcaagccgtgccactaacggtgctacatcaatgtgatgcgttttcgccagcagttccagatgcaaacgcacccccgccagtggcgttcgcagttcgtgcgcgacgtcagcggtaaacaacctttcgttatccagcgtgctggtcaggcgactgaccagatcgtttaacgcgctaaccaccgcttcgatttcgagggtggcgctgtgaatggcaatgggcgttaagttgtcggcggtgcgcgcttccagctctttttgcagctccgccagcgggcgggtgatgcggcgtaccgcctgatagcagataaatagcgtcaggctgaccataaagacgccggggacaatcaggctggcgaccgcctcgcggatctcacgcatgatgtggcgatcgttgttgcgattgtcgcgtagcgcctgctcaaacagctgaatctgctcggtactttcatgccatagccagaagacgctgatcagctcaaacaccaacaaaatggccccgatggtcaatatcagccgttggcgcaggcttattggtcggcgcagaaaatgcatcagattcaattagttttcctcattcgcgaccagcatatagccaaagccgcgcacggtgcggatacgggctttgcccactttgtcgcgcagattgtggatatgcacttccagggtgttggtgctgggttcattgtcccagttatagatgtcgttgtagagaatttcccgatgcaccggactgcctgctttgagcattaaccgactcagcagagcatattctttgggcgtcagaatcaactcttcaccgcccatccatacctgacggcgacccatgttcagcgtcagattgccaacaatcagctcactttcgccctgattattatggcgtcgtagcagggcgcggatacgggcatgtaactcttccagcgcaaaaggcttcaccagatagtcgtcggcaccgacatccagcccggcgattttgtcggtcagcgtatcgcgagcggtgaggatcagtaccggcagggtatattttttctgccggatacgggcgagaaaatgcagtccatcttcgtcgggtaaccctaaatccagtaccaccaggctgtaatgacctgcctcaaggctttgttccgccatccgcgcggttgtcacgctatcgcacgcgtagccttcggtttgcgccgccagaatcagtccctgcaataacagcgtatcgtcttcaacaatcagaattttcattcactcactctcctgcaagtttgcagaatatcatccgcagcctggtaatacttcgtctcaacgccagttaatcccaatagcgtggagaataaattgtcttgactatagtgttgcgtttgcgcctgtttttgcaggcagttctggtcaacctgataccgtttttgataatcctcgctcagccacagcagcatcggcacctgtttttggctatccggggcgatggcataaggcagaccgtgcagatagatgccattttcacctaagctttcaccgtggtcagaaagataaaccaggctggtggtaaatttatcctgatgttctttcagcagattaatcgctttatcaacaatatagtcgacgtaaaccagcgtgttgtcgtaagtgttcaccagttgctctttggtacaggtctggatctcattggtgtcgcaggttggggtaaatttcctgaactgaggcggatagcggttgtaataggtcggaccgtggctgccgatggtgtgtaagacaatcacgccatcaccttgcaggttattgatgtactcttcaagcccgtggaacagcacttcgtcatagcattcgccgttgatgcactgatcaggtagattcagcgcggtgacgttctggtgaggcacgcggtcgcaggcacctttacagccgccatcgttgtcattccacagcacgttgatgcccgctcgctgaatgatatccagcacgccttcctggtgctgtgccagctcttctttgtagtgctcacgcggcatatcgctgaacatgcacggtacactaactgccgttgccgtgccgcaagatgcggtattagggaaatagaccacgttatctttcgccagccgcgggttagtttcacgcgggtagccgttgagggagaagttctccgcccggctggtttcgccgacaatcaggatggtcaaatttttacgtttttcgttctgcattaacgggttgcggtgcgcgtcttcaccaattcgcaccagcggcagatttgccagtcgctgatgggagtaccaactccagctggcaacaatgctgttagaggggcttaaggatttcaccagctctttgttattgcggaacaagctggcgtagtctttataaaacagtgcggcgaccagcaaaatcagtagtacagaaaccagaatattggctccacggaaaagaacactgcgcagacggctggtggcaggtttgatttttatccagcaggcaatcagcgcagcaagcacgccgctgaatcccagcgttaataacatttgcggtgtcatcagcgcataactttctgccggagtggtatcaataatattggcaatcatgctgcggtcgatgacgatgccgtaagtcattatgaaatattgtgcagccgcgccaaccagaataaacaggcaggccagtggtcgattaagccataagaaagagcttagtgtcaggacaatattaatcacgctgaaagcgacgaccggcatgctcaagaaaaccagtacgttatgcaggctatccagcggcagcgcctgcaacacctgtttaaaaaaggcaatattcaggcagatagagatataaaaagcggccaacaatagccaggcgagtaaattcaaagagggtctttttagtaggcgcttcaacatcacggtgtttccatcgaacaaagtgcgcatatgctcgcaaagcaaaattaagccaaccttaagttcttaaggttggcttttatgtttgctggattaaggggaattaatctttgcttattggtgcatctaagggatacgggtttttatgtagccggttgtaattcagcgcatacatggcggtgatgaccatcagggtgacaaaactccacataacctctttcgctccggaccccaccacggcccagatgcagtagaggaaggcaatggtagtaactgccagatatgccgggcgtgctttaccaaagtgaccgtgtccgagcagcagtaacgccgcacaggtgtaaagatatggcaccagtgtaaagatgacgctgacggaagaaaccagaccgaactctttggtcgcgtttggactaatgctgctgagctggaagatggtcatcaaaataccgacgataatcagccccgccactggcgtacccgctttatttacacgggcaaaaatcggtgggaacagtccgtcatcggcagcggctttcgccgtttgacccgccagcaacgtccagccgcccagactacctaagcaacccgcagctgcgcagaaggaaacaatggccccggcggtgtcacccaacgccatccgtgcggcatcaccgaatgggctagcagaaacgcgcagtgcggcattagggatcatccccataatcgcggtggtagaaagtacatagcaaacggcggcaatcaataccccaccaatggtggcgatagggacattgcgtttcgggtttttcaccacacctgcggcaacggaggcactttccacaccgatgaagctccacagcgtaacgttaagggtactttgaattgcaccgaaggtgcccaggccgctgacgttccatgccgccatataggtttcaccacggaaccagaaccagccaaatacggcaatcccgacgatggggatcagcgccagcacggtggcaactgcctgcacacgggtgatcattttcggaccgacaatgttcagcaggacgaagatccacagcaccacgacgcaggtgatggttaataccaatggatctttcagaatcgggaagaagtaacttaaatatcctacgccaatgaccaccatggcgatattgccgatccagcaggccagccagtagaggacgttggtttgataaccgagaaacgggccaaagcagcggcgggcgtaagcgtaagaaccaccaggacttgggtcgaggaagctcattttggcgtataccatgctgagccccagtgcaccgataatcgtcaccaaccatccataaatggcaatcccgccagtagaggccaggtttgcaggtaacagaaaaacaccactccccataatattcccgctcaccatcagggtgacggggattaagcccactttgtgagcatcagcatcgctagacataattaaactcctgcgaaggcgagcttcgtgacaataaattacgtcatatcatacgcctgcattcgatagttgaattattatcgaccgggttatcgctgatgccgttattaatatagctcttcgttaaggttaaaaatcaggcgacagtgcgttctctgtgctgactaacataatgcagcggcgtcataccgtagaagtctttaaagacagaaataaagtagctcgtactgttgtagccgcaggactgacttacctgagagatatttttaccgtccatcattaattcatttacggcataacgcatgcggcaggtggtgattatttggctataactggtgttttcgcttttcaactttttctttaacagacttgggctaagacataaacaactggctaccatactaagattccagtctttgtgaatatcgctttcaataatttgataaacgctgtcacttacacaattacgtaacatatacatcattaaactaacgaattttttactgtcgagaaaacgggatagcaccgtgaataataatgcgcgtgttcgttccttttcactctcagtttctgcgggcatcatgctgtgttgcgcggcaacgcgaaagacgtctggcgtcaggcatggcagggtgagtatgggcgtagcgctacgttgccatactggtatttggctgagatctttattcagaaaccggaggtaatctttgatgatgtcgtgactaatatgagcaaccaaagtgttgttaagagaggagacgtcgataatattattttcacaatttaataacgccatatggttagctttaaggctaataggttctttcccattcacccttatccagacatctttttcagtcaataaaacaatacaaggttggtcgctgcaaatcctcatacatgtactcctgagtgcgaataaaagaccagttctcgctaaagcaaagcgataccgggaaatggttatataattgtatgatgaatataaacatgcataaaaataacgagttttactaatagtacaaatttttatagtaatttctcatgtacatatttttttacaggataaataacaggcaaaaaaaagcgcggggtggggccgcgcaaaaagtatgacatttttgtttgcagcaatttttatgaaaacgttgccatactcaaaaggcctaaggccaggcggcgtaatgttatttaaacaattacgccttcagcggaatagtggttacgctttcacgcacataacgtggtaaataccgtcaataatttcagtcccttcagtttcgtgttcaaatccagggaaatggtggtcccaggattgcaggctgcgtaaataacttacttgcggactgtttttatcgccgaagttttcaccagacagcagcatcgggattcctggcggatacgggataacactgtttgccgcgatgcgtcctggcagattttcaatggataccagttcgacattgttgtcgacaatcgcgttgtacgcttcacgcggggtgacttccgccaccggcaggccggaataggcttcgttcaaccgtgcgccagggttgttttctttcagccaggcaaacatggtgtcacccagatcgtgaatccccatgttcgcgtaagtgtcaggatattgttcaacaagttccggcatcacctgcgccagcggtgtgttggcgtcatagtggcgtttgaaggagcaaagggtgttaaccagagttccccatttcccacgggttacgcccatagagaacaggaacataatttggaagtcagtggtgcgggtaggtacaatgccgtggcgaccaagccaggcagtgaccagcgccgccggaacaccggtttcttccagttcaccatcttcacccattcccggagcaaggatgctgactttaatcgggtcgagcatactccagttatccggaatatctttgaagccgtgccagctttcgcccggatgcattacccagcagtcctgaacggtggtcagcagtttggttggtgcgtcagcaaagtcataggttttgccggtttgtgggtcggtgacgacttctttgttccacggtttgaagaaccagctaccgtcagcggtgaactctttatatagccgcgccatcgcctgacggaaatcaaccgcttcgtcaatcacttcctgtgtcagactcaggccgctgttgccgtccatcatgctcaccgccacgtcgttggatgcgcagatggcatacagcggggaggtggtggcatgcatcatgtaggcctggttgaagcgggagaagttaatcgccccacgaccttcacgtacatgaatataagaagcctgactcagcgcattcagcagtttgtgggtggagtgggtggcgaaaacggtaggaccgttgtgatcgccaggttcgccgcgcatggcatagtgatcggcatagatcgggttgaaacgtgcatagccgtaccaggcttcgtcaaagtgcagacgatcggaggttttttccagcagatcctgcgcttctttagcgttataacacacgccgtcataggtgcagttggtcaccacgcagtaagacggtttttgcccggctttgtctttggtcagcgggctttcactgattttcttctgcaaggtttcaggttgcatttcctgcggatagattggcccgataatgccgtagcggttgcggcttggcaccatatagaccggtttcgcgcctgtcagcatcaaaccttgttcgatggatttatggcagttacggtcaacgaccacgacatcgttatcggtcatgcaagcctgcatgatggtgcggttagagccggaagtaccgacgactacgctccaggagcgatcggcaccaaatacgcgtgcggcatatttttcgctttcgccaaatgcgccagtatggtcaagcaaagaaccgagggaagttcgttcgatgcccatgtcggtgcggaacagattttcaccatagtagtcatggtagaaacgtccggcgggtgttttggtaaaaccaacgccgccctggtggcctggcgctgcccaggaatattcatggatgtcactatatttcatcagcgcgctgaacagtggcggcaacagctgctggcggtagcgggtcatcgcggcaacggcgcgtccggcgataaagtcggcggtatcttccagaatccaggcgaattcatcgacaagctccagcaggtcgcgatccattgcggcgagggctttttcccgatcgcccaacaggaagaccggcacgttttgttggcgctcatgaagcttaccgatcaattgtctgacgttttgatgttcgtccggatgttccatttgatagctgaacatcaggcagtcaatggcttcgttactagagagaatggcaaaaccatcatcaaaggaggtggatttaatcacggtaacattttgctggcttaaagcatctgccagacgctcaacggcgttaccgacccaggtgtcttgatggagaaactcgctttcaacaattaatactttcatcattgcttacccggttatgaaggaatcttcgttgcgggcaagtatcttccggccttttcgggctgtaaagcgcgtgaaaaacaaacatttttgaaatatttagttttataaacaatacgttatgtgattattttaaattattttcactgcttattatcgacggctaaactatttttttggctgatactgatatcgtctttagccgggaaacgtctggcggcgctgttggctaagtttgcggtattgttgcgggctcatgccgacatatttgccgaacgtgctgtaaaaacgactactactacgaaagcctgccgtcagggcaatatcgagaatacttttatcggtatcgctcagtaacgcgcgaacgtggttgatgcgcatcgcggtaatgtactgtttcatcgtcaattgcatgacccgctggaatatccccattgcatagttggcgttaagtttgacgtgctcagccacatcgttgatggtcagcgcctgatcatagttttcggcaataaagcccagcatctggctaacataaaattgcgcatggcggctgacgctgtttttgtgtgtgcggctggttttattgaccagaatcggttcccagccagagaggctaaatcgcttgagcatcaggccaatttcatcaatggcgagctggcgaatttgctcgttcggactgtttaattcctgctgccagcggcgcacttcaaacgggctaagttgctgtgtggccagacttttgatcaccatgccgtgagtgacgtggttaatcaggtctttatccagcggccaggagagaaacagatgcatcggcagattaaaaatcgccatgctctgacaggttccggtatctgttagttggtgcggtgtacaggcccagaacagcgtgatatgaccctgattgatattcactttttcattgttgatcaggtattccacatcgccatcgaaaggcacattcacttcgacctgaccatgccagtggctggtgggcatgatatgcggtgcgcgaaactcaatctccatccgctggtattcgctatacaggctcagcgggctgcgggtctgtttttcgtcgctgctgcacataaacgtatctgtattcatggatggctctctttcctggaatatcagaattatggcaggagtgagggaggatgactgcgagtgggagcacggttttcaccctcttcccagaggggcgaggggactctccgagtatcatgaggccgaaaactctgcttttcaggtaatttattcccataaactcagatttactgctgcttcacgcaggatctgagtttatgggaatgctcaacctggaagccggaggttttctgcagattcgcctgccatgatgaagttattcaagcaagccaggagatctgcatgatgtctgcacccaaaattacatttatcggcgctggtagcacgattttcgttaaaaatattcttggtgatgtgttccatcgcgaggcgctgaaaacggcgcatattgccctgatggacattgaccccacccgcctggaagagagccatattgtggtgcgtaagctgatggatagtgcaggggccagcggcaaaatcacctgccacacccaacagaaagaagccttagaggatgccgattttgtcgtggtggcatttcagattggcggttatgaaccttgcacggtgactgatttcgaggtctgtaagcggcatggtctggaacaaaccattgccgatacgttggggccgggcggtattatgcgcgcgctacgtaccattccgcatctgtggcaaatttgcgaggacatgacggaagtctgccccgatgccaccatgctcaactatgttaacccaatggcgatgaatacctgggcgatgtatgcccgctatccgcatatcaaacaggtcgggctgtgccatagcgtgcagggaacggcggaagagttggcgcgtgacctcaatatcgacccagctacgctgcgttaccgttgcgcaggtatcaaccatatggcgttttacctggagctggagcgcaaaaccgccgacggcagttatgtgaatctctacccggaactgctggcggcttatgaagcagggcaggcaccgaagccgaatattcatggcaatactcgctgccagaatattgtgcgctacgaaatgttcaaaaagctgggctatttcgtcacggaaagcagtgaacattttgctgagtacacaccgtggtttattaagccaggtcgtgaggatttgattgagcgttataaagtaccgctggatgagtacccgaaacgctgcgtcgagcagctggcgaactggcataaagagctggaggagtataaaaaagcctcccggattgatattaaaccgagtcgggaatatgccagcacaatcatgaacgctatctggactggcgagccgagtgtgatttacggcaacgtccgtaacgatggtttgattgataacctgccacaaggatgttgcgtggaagtagcctgtctggttgatgctaatggcattcagccgaccaaagtcggtacgctacctagccatctggccgccctgatgcaaaccaacatcaacgtacagacgctgctgaccgaagctattcttacggaaaatcgcgaccgtgtttaccacgccgcgatgatggacccgcatactgccgccgtgctgggcattgacgaaatatatgctcttgttgacgacctgattgccgcccacggcgactggctgccaggctggttgcaccgttaaaacgcgactaaacgctactgcgccgggggatttattccggcgcacacctctgacgataccaataacagaaggcgggcgttggtaacagcgacccgataccctatgagcatttcaatgactacaaaactcagttatggatttggagcgttcgggaaggattttgcgatcggcattgtgtatatgtacctcatgtattactacaccgatgtcgtcgggctgtctgtgggtttggtcggtactttgtttctggtggcgaggatctgggatgctattaacgatccgattatgggatggattgtaaatgctacgcgaagccgatggggtaagttcaaaccctggatcctgatcggtacgttggcaaactctgtaatcttatttctcctctttagtgcgcatctgtttgaaggtactactcagattgtctttgtttgcgtgacctacatcctctggggcatgacttacaccattatggatattcccttctggagcctggttccaaccatcacgctcgataaacgtgagcgcgaacaactggttccttatccgcgtttttttgccagtctggcaggctttgttacggcaggtgtgacgctaccatttgttaattatgtcggcggtggcgatcggggatttggctttcagatgttcactctggtactgatcgccttttttattgttagtaccatcatcactctgcgcaatgtgcatgaagtctttagcagtgacaatcaaccgtctgctgaaggaagccatctgacacttaaagccatcgttgcgctaatttataaaaacgatcagcttagttgcctcttgggtatggctcttgcttataatgtagccagcaacattattaccggctttgctatctattatttcagttatgttatcggtgatgcggatttgttcccctattatctgagctatgcgggagctgctaacctggtgacgttagtattcttcccacgcttagttaaaagtttatcccgacgcattttatgggccggagcatctattcttccggtgttaagctgtggtgttctcctgttaatggcattaatgagctatcacaacgtcgtcctcattgtgattgcgggtattttgctgaatgtgggaacggcgcttttctgggtattacaggtcatcatggtggcagatatcgttgattacggtgaatataaactgcacgtacgctgtgaaagtatcgcttactccgtgcagactatggtggtgaagggcggtagtgcctttgcggcttttttcattgcggttgtgttagggatgattggctatgtaccgaatgttgaacagtctacgcaagccctattaggtatgcagtttattatgattgctctaccaactctgtttttcatggtaacgctgattctctacttccgtttctatcgcctcaatggtgacacgctgcgcaggatccagatccatctgctggataaatatcgcaaagtaccgcccgagcctgttcatgctgatattccggtcggtgcagtgagtgatgtgaaagcctgacgtggacaatagctaacgaaaatggcctgatgcgatatgtttatcaggccacgtcttaatgtaatgctttggatttgcaaattttgtagaccggataaggaattcacgccgcatccggcatcaacaaagcgcaagttgttatccggttatcaagccaaagcgccgtagctggcggcaatgaaagcgagcgaggaatatcaccgtcgttaatgcgccaagcagcgcgcagaacatatcggattgcgtgtcccactggtcgccctgggtgccgagaaaatcatccgctccctgacccattgccagcgctgcccaccactcgattaattcatacatcgcgcttatcgccagcgccacgcagcagaccaggaacgccaccattttacgtccgcgcacgtacatcccgcgaacgagaatttctcgtgccaccagtgcaggcaccagcccctggaaaaagtgccccagcttgtcatacggattacgactcaaccccagccattcctgcacctcaaaaccaacggggactttcgcgtaggtgtattgtccgccgaccatcaggatgatggcgtgaaggaaaatgagcgtatagagcagcggcgttaacggataacgtctggcggtggcaagcagtagctgcacgacaataatcaccggtgtcacttccatcagccaggtgagtttgtcatgggcgctaatgccggtataaatcaggattaacgttagcgtcagtgcgctggtgttaagaattaacggcttgagtgtgcgggtcatggtgagttcgcaaatcagggaaaatactgactattcaccagcaagcgtgaaattacaatcgcaaaagaggtggccagggggatcacctggcagcatgctgccaggcgctgggccgaagaggttacttagtgcagttcgcgcactgtttgttgacgatttgctggaagaagtcgttacctttgtcatcgaccaggataaacgccgggaaatcttctacttcgattttccagatagcttccatacccagctccggataagcgacgcactccagatgcttgatgctctgctgcgccagtaccgccgccggaccgccgatgctaccgaggtagaagccgccgtgtttatgacacgcgtcggtaacctgctgactgcggttacctttcgccagcatgatcatgctgccgccgtgggattgcagcagatccacgtaggagtccatacggcctgcggtggttgggccaagactaccacttggataaccggcaggggttttcgccggacccgcgtagtagatcgggtgatctttgatgtactgcggaagttctttaccggcgtcaatcagctctttcagcttggcgtgtgcaatatctcggcccacgataatggtgccggtgaggctcaaacgagtggataccgggtattggctaagctgggcgaggatctctttcatcgggcggttaaggtcaactttcaccgcttcgccttcaccggcctggcgcagttcttgtggaatgtactggcctgggttgtgttccagtttttcgatccagataccttcgcggttgattttcgctttaatgttacggtcagcggagcaggagacgcccatgccgaccgggcaggatgcgccgtgacgtggcagacggataacgcgaatgtcgtgcgcgaagtatttaccgccaaactgcgcgccaagaccgagtttctgggcctcttccagcagttcctgttccagctggacatcgcggaacgcctgaccatgttcgttcccttccgtcggcagttcatcgtaatagtgagcgcttgctaacttgacggttttcaggttggtttccgcagacgtaccgccaatcacaaacgcgatatggtacggcgggcaggctgcagtaccgagggtacgcattttctcgacgaggaagtttttcagtttgccgggagtcagcagggctttggtttcctggtagagatacgttttgttggcagagccgccgcctttcgcaacgcaaaggaatttgtactcatcgccatctaccgcgtacaggtcgatttgcgcaggcaggttagtgccggtgttgacctctttgtacatgtccagcgccgcattctgactatagcgcaggttatcttcgatataggtgttatagacgcctttgctcagcgtttcttcatcaccgccgccggtccacacgcgctggccttttttaccgacgatgatcgcggtgccggtatcctggcaggtcggcagcacgcctttggcggcgatttcggagtttcttaagaattgcagcgccacgtacttgtcgttttcgctggcttctggatcgtgaagaatagccgcaacctgtttctggtgtgccgggcggagcataaaagaagcgtcgtgaaaggcttgctgcgccagcagggtcagggcttctggttccactttcaggatggtttcgccgtcgaagtcggcaacgctaacgtaatcggaagtgagtagatagtattcggtattgtctttccccatcgggaaaggtgcctggtagataaagggtttgttactcatagcttccagcctgtaactctgtatttgttattcgaaaatggcgtgccgcgtagtcacgggcggcacgcaaagtgcatttataagaacccgtacatcgcggcgaagatccagccgaagacgcagcttacgctcacaccaatcaaccccggcagaataaagctgtggttgatgacgaagcgaccgatgtgggtggtgccggaacggtcaaactgaatcgctgccagatcgctcggataagtcggcaggatgtaataaccgtagcaagccggtgcactagccacgatgtatgccggatcaacgccgatcgccagcgcgaccggaacaatcgccgccagcgccgcagcctgagagtttacaaacttggaaaccagcagcagaacaatggcataggcccacggatactctttcaccatttcacccagtacgccctgaatttcagacatatgcgcaccgaacatggtttctgccatccatgcgataccgtacaccgccacgatggcgatcataccggaacggaagacttcgtttttactgatagacgcgggattggttttggtcaggataataatcagcgccccggtcagcagcataaacatctgaataaccagtaccatgctcagcggtttgccgccgaaggatggacgcaggtcgctatcagcaccaagaagggcgactacagcgattgccccgaggaaaatccacattgccagccagttgcttttcggcagttttttatccagcagcgtcgcggtatcaccgtaaacatactcacggttttccggtacggagatgaatttctggaactcttcgtctttatccagatctttaccgcggaaccagctgaagataccgatcgccaggataccgattaacgtgcttggaatggtgattgccagcagatcgaggaactcaagatggcgaccatcaaaggtgacattacccagcatcgcaaccagagacacgaccgcaacgctcaccggactggcgataatccccatctgtgcaccgatagaacttgccgccatcggacgttccggacggatgttgttcttaatggcgacgtcgtagatgatcggcagaatggtgtaaaccacatgacccgtaccgcaaagaatggtcagtgtacaggtcacaaacggcgcgacaatactgacatatttcgggttgcggcgcagcagcttctcggcaatttgcagcatgacatcaagaccgccgctagcttgcaaggtcgcgcttgccgccaccaccgcaatgataaccagcatgacatcaactggtggtttacctggctgaaggtggaagacgaagaccagaatgaccagaccgataccgcctaataaacccagcgcgataccaccctttctggcaccataaaacagacatatcagtattatgataagttggatagtaaataacatgtgtgaaccctcgcgataatcctatttaaatttttgctgaatagatcacagtcacgttctgttttgtatgaactgttttcagagcctgactaaatatccgtttggtcgttaccggctttagcaaatacctcacagtgaatattggctgattaaagcagcggcaaatttatgcactgtgataagcggctttttcagagagaaagactctctggcgatgggtttatagtttgtactgcgcagatgttaatgttttgtttgctgttatcttattgatatttatcggtctattttttgttctcagggcagatgtcattaggtttatagattaatctgatctacccatttgtgggtaaaaatacacataatgcgggtgacataatagttaattaacttttgttagcgttttgaaattaaaaacaccgttcacctgaagagatattaatttttagcgatgatggagggataattatatttgatctggcacaagttttactgatgaaggatgtaacttgtgccaggggtattttgcattacggtaataattattacttacagataaccagcgatccgttattggcaatattgtttcagtagactgtagtgttctgcctgaatacggtaacggtaaactggacgccccgtgacgccataatggatactggtgaacaagatgtggcagttgaccagccagatgaggtatttacggcaggaaacacggctaatgttaacctcgttggctagctcgtcggtactaaattcatagtcctggtgcgcgtcaatccactggcacagtgtgcgtaacgtctgcggcgttaagccttttggcaagcgacgaggatcctgttcgttggagctgctgccgtggattagctgatcaagctcggcctggtcataatactgatgtttttccagcgccattttcttttgccgccagccggtgagcgcctcttcaaagcgggaagcctggaagggtttgatcaggtaatccacgacaccgtaatgcaggctatctttaatggttgccgcatcggctgcggaggagatgacaatcacatcacttttgcaacgcgcgttatgcaggacaggcagtaaatcgagcccgttctctttttgcatatagatatcgagcaatatcaggtcgataggcgtatcgctattgaagataatctctttggctttctccagcgtgctggctgttccacagcattgaaagcctgggatttgtgctacgtatcggcgattcagctccgcgaccattgcgtcgtcatcgataattaatacattgatcatctgttgctcctctccccgtcccagggtatctggacaaaaaattgtgtgaaaatcccgggttcgctttccacggcgatgctgccgccgagattttctacctgttgtttgacaagtgctaaaccgacgcctcgctcgcttccttttgtgctgacacctttgtcaaaaatgtgatcgattttatcgggtgcgatccccggtccatcatcattaacttcacagtgcagccagccgtgacggtagtgcaatgttacgctaatttcgcctccgggttccggccctaatgcctccagcgcgttttctatcagatttcccaacgtggtaatcagcgtcgcgacctggtcctcactgccgctgtctggcagctggctttcactgtttaaaatcagcgtatggcctaaatcggtcgcgcggttaatcttgctgattaaaaaaccagcgataaccggagatttgatcttacccagcagagagccaatctcttcctgatagttattggctgttttgagaatgtaatcttccaactgcttataactcttcagatgcaataatccgagaatcacatgcaatttattcataaattcgtgggatcgttcacgaagtgcgtcagcatagttgaccagaccgtcgagtcgctgcatcagtttacgtacttcagttttgtccctgaaggtactaatggcaccgatgataacgccattactgcgcaccggaacggtgttgatcagtaatagccggtctttaatcgtaatctcttcgtcgcggcgcggggtaccgtcgcgtaacacttcgctgacatctaccacctgactccaactgtggcttagcgtgctcagtttctcatcgtcctggctcttacggtaattcagcaattcttgtgcggcatcgttgatcagcgtgacctcgccgcgatcgtccacggcaacgacgccttctttgatagactgcaacatggcctggcgttgctcaaacagcgtggagatttcgtagggttccaggccgaaaaggatttttttcagtaccttaaccagaatgcaggtgccaatcagtccgaccagcatgccaaataatacgctccagataatgctccagcgactgtcattgatctgttgggtcacacggcttaactcaaggccgatcgccaccacgccaatttgtttatgattttcatcgtagatgggggtaaatacgcgtaaagcctgcgccagaaaaccgcgattgatagcgacattttcttcgccattcagcgctttaaggatgtcatcacctttaaatggctgaccaatacgctgggcttcaggatggctgtagcgaagactttgcatatcggtaacgacaataaacagcagatcgttgcgtttgcgtacggcttccgcgatggcctggatgccactctcctgcggttttttctgcaagccctgacggatttccgggctgtcggcgagggtacgcgccactgccagtgccttgttggctagcccatctcgcgtcatatcactgatttggctgaagtaaatcagatgcaccaccaatagcacgctgaacagtaccgcactgaccattaagatcactgtggtactcaatttcatcggacgtttgcgtaacatgcggtagggcaaactatgtctcatcagcttccttgtgtgacaaatttcttaagcattatctctgatgaggcgggtaattcaaagggagtaagaatgattggctatataggggaagagactctggcaacggaaactgccagtgctgtatgaagattccggggctatgcttatagcgataatcatactgatgagagagggaaggtcatggatcaggcgctactggacgggggttatcgctgttataccggcgaaaagatcgatgtctatttcaacactgcgatatgtcagcattctggcaattgcgtacgtggcaacggcaagttatttaatctcaaacgaaagccgtggatcatgccggatgaagtcgacgtcgccactgtggttaaagtgattgatacgtgcccgagcggcgcgctgaaataccgtcataaataagcgagggtaaaatggaaatacgcgaaggccacaataaattttacattaatgacaaacaaggcaagcaaatcgctgaaattgtctttgtgccgaccggagagaatttagcgattatcgaacataccgatgtcgatgaaagcctgaaagggcaagggattggtaaacagctggttgcgaaagtcgtggaaaaaatgcgtcgggaaaaacgaaaaattatcccattatgcccatttgcgaaacatgaatttgataaaacgcgggagtatgatgatattcgcagttgatgggagagtacagagtcacgatatttttcattctctccgcgatgtgatgcaggagagcatctgaagggtagggggatgcacaaagaatgggcagagagcgcgtttttttgtcccaagtcatcccctttactgagcaaaaaaaagaatatctcctatatgagaatcatcaatcggggttaataagttttgcgtccccagagcgtttaatattgataggagtcatattatggaaggtaaaaacaagttcaatacttatgttgtttcttttgattatccaagttcttattccagtgtgttcttaagattaagaagtttgatgtatgatatgaatttctcctctatcgtggctgatgaatatgggataccacgacaattgaatgaaaactccttcgcaataacgacaagcttagccgcaagtgaaatcgaagatttaatcaggctcaaatgcttagacttaccggatattgattttgacctcaacattatgacagttgatgactatttccgtcagttttacaagtaaccaggaaggataagaagaacataaaaaatggcactattctctaaaatattaattttttatgtgattggtgtgaacatatcctttgtcattatctggtttatcagtcatgagaaaacacatattcgtttacttagtgcattcctggtcggaataacctggccaatgagtctgcctgtggcattacttttttctctcttttaagagctgtagttgagtggacccgctggttatcgtgaaacgaagcgtctctcctcaaaactggatttgcggaacgatgaacgaagcagtcgcctgactgcttcgttcattaaagtgaaatttatttctgtgggcgcatcgccgggaagagaataacgtcgcgaatagtatggctgttagtaaacagcataatcattcggtcgataccaatacccagaccagcggttggcggcagaccatattccagcgcagtcacgtaatcttcgtcatagaacatggcttcgtcgtcacctgcagctttagcattaacctgttcctggaaacgttcagcctgatcttctgcgtcgtttaattcgctaaaaccattaccgatttcacgaccaccgatgaagaattcaaaacggtcggtgatttccgggttaacatcattacggcgtgccagcggggacacttctgccggatattccgtaataaaggttggctgaatcagatgtgcttctgccacttcatcaaagatctctgtgacaatacgtcccaacccccagcttttctctaccgtaataccgatagattcagctaatgctttagcagcatcaaaattatccaggtcggccatatcggtttctggacgatattttttgattgcttcgcgcatggtgagtttttcaaacggtttgccgaaatcaaacacatgctcgccataagtgactttagtggtacccagaacctcttgtgccagggtgcggaacagactctctgtcagttcaatcaaatcgtggtaatccgcatacgccatgtagagttccatcattgtgaactcaggattatggcgaacagaaataccttcattacggaagttacggttgatttcgaatacccgttcaaaaccgcctacaaccagacgtttcagatacagctccggcgcgatacgcagatacatatctaaatccagagcattatgatgggtaataaacgggcgagcagatgccccacctggaattacctgcatcatcggggtttctacttccataaagccgcgcgcgaccatgaattgacggatagcggccagaattttactacggacaacaaacgtttgacgggatttatcgttagcgatgaggtccagataacgttgacgataacggacttcctgatcctgcagaccatggaatttatctggtaaaggacgtagtgctttagtcagcaggcgcagctcagtacagtgaatggaaagctcacccgtttgcgtcttaaacagcgtaccgcgggcaccgataatgtcacccagatcccattttttaaactgatcgttataaacaccttctggcaggctatctcttgcaacgtacagttgaatacggccaccgacatcctgcaacgttacaaaggaggctttccccatgatacgacgggtcatcattcggccagcaacgctgacttcaatgtttaaggattccagttcctggttatccttcgcatcaaactcttcgtgcaactggtcagaggtatggtcgcggcgaaaatcattgggaaacgccacaccttgctgacgtagtgccgccagtttttcgcggcgatttctcagttcatcgttaaaatcaatagcctcattggctccccgtgtttcttgttcagacattttggttcctctaaatccagctttcaatttagcgtagataaagagacagatcggtacactgtattatctgcctcgactattagtaactcagtttatcttatcgaaactaacgcttacctcaagttgatatcactaataaataaccatcaaaatggtttaaatgacttattaatctcgatttgttagtgttataaactaaaagttaatttattcataaccaattgtttttacgacagttaatcgttgctctcctgtatcatattcgtcggcgtgctaaacagaaaacgggtagcaaaggccaatacgacgatgatcgcgacacaagccaacgtccactctcccatctgagaaaagaatcgctggtaagctgcaattgccataccgctaatttggctctctgtcgtctgctgtgccacgacgcctgccagccagttggcgaccgcgcctgttgccagcatataaatcccggttaatacgccagacattttcagacgcgtgatttgcgcaatcgccaccgggtcaataaagagttcggcaaagcccattagcgccagcccggatatcatcacgcccatactcgcttgaccgtcagccgctgcatgtcgggcatcaaatgccaacaacataaagccacaagccatcagcagtaagccaaaggcaaacttcagccagacgcgcaatgtactgttgccgcggctttctgggctcgccagccaggccagtacaaccccagcgagcatcaccgcaattgcattcacgctctggaatagtgctgtaggtacttcaatattgaatgcctgacgattcacaaagcgatcgataaacaagctgatggtactgccgccctgttgtgccagtacccagaacaatgtcccgacaaacatcaacaatacaatttgccaaagagcacggcgatgttcggggaatttgatcatcatgcgggcaatgatttgtgcggcaatgaggcaaacgatcgccagcaaatatccggaccagtcgttctccagcagcagagtaaaaaatactggggctaaacagagcatcaccactaaccagctccatactggtaaggcaaatttgacactagtgagcgcttttttatccatactacgtgtggactggaaatgacgatgaccgcttaagaaaatcaacaaaccgataaacatgccgccacccgcaagggcaaagccaacatgccatccataccactgagcagccaggccgcaggcgattggggctgcgatagaaccgatattgcccgcagcatacagcaggctaaaaccgccatcacgtcgatgatcgttctcgtcgtagagctcgccaagcaaacagctgatgttacttttgaataaaccgtagccacaaataatgattgccagcgccagatacaggctaaaggtactatttgtatcaatacccagcaccacatggccaagggtcattaacagcgcgccggcaatcactgcagtgcggttgccgagcaggcggtcggcaagccagccgccgagaataggggtaacgtaaaccagagaagcatatgcgctgaacaggctgatggcatggttatcatcaaaaccaagctgatgggtgagatagagaatgagtaaggcacgcatgccgtaaaaactgaagtactcccagatttggatcgccacgatatagtatatcgcgcgcggctgactgggtgttttcatgtgttctccttatgagcaaaaaagggaagtggcaagccacttcccttgtacgagctaattattttttgctttcttctttcaataccttaacggtatagcggccatcagcctgacggtatgcaccgtgaatatcggtttcaaagcccggatagtgagcgccgatttcacacagcatctgcaggaactccagaaccggacgactttcttcggtgatcatttcacccggcattaccagaggaactcccggcgggtacggaaggatcatattggcgttaatacgacctaccatttcgtcgaggtaaacttcttcggtcataccgtgcagctctttctggaatgcagcatacggagtcattaccatcgtcggcagcacttcaaatgcgcgatacatcagatccggcagattgtggtgaacaatcagtttgtggatattctgagccagttcctgaatacgcatgttttcatagaattcaggatcttcacgatacagagacggcagcatgtttttcacacgcaggttcaggtcgaacgcacgtttaaagtcagtcagagcacgcagcaggctcagtgctttggtcttatcgataccgatgctgaacaggaacagcaggttatacggaccggttttctcaacaacgatgccatgttcgtcgaggtatttcgccacgatgctggccggaataccaaagtcgctcatggtgccgtctttttccatccccggagtcagcagggtgactttgatcgggtcaagatacatgtgctcgttatcgatgtttttgaagccgtgccaggtgctgtcagaacgcagcggccagcattcagtcgtatcgatatgatccggctgccatacatcaaagaaccagccatcagattccgttctcagacgtttgatctctttacggaatttgatcgcacgttcaatagaaccgttgatcagacgcttacctgcattgcctttcatcatcgccgcagcggtttcagtggacgccacgataccgtagtgcggagaagtggtggtgtgcatcatgtaggcttcgttaaaggtttcttcgtttacgtcacctttaacgtggatcatggaagcctgagagaacgccgccagcagtttgtgagtggactgggtttcgtaaatcactttcccttctacacggccaccgctcataccgcatttaccttcgtaaatcggactgaagttggtgtaaggcacccacgcggagtcaaagtggatggatttcacatccagtgttttcttgatgaagtcggtgttgtacagcagaccatcataggtagagttggtaattacagcatgtaccggccaggttgcgtttggtgtttctttcacgcgcttagcaatggtagcgtgctggaattcactctgtgggataccaccaagaataccgtaagcgttacgggtcgggcggaaatagattggcgtaacatcgctcatcatcatcaggtgggtcaggcttttgtggcagttacggtcaatcagaatggtgctgcctgctggagcagagtacataccaacaattttgttcgcagtggaagtaccgttggtcaccatgtagctgcggtctgcgttaaagacgcgagcgatatactgttctgcttctttgtgtggaccactgtgatccagcagagaacccagttcagatacactaatggaaatatcagatttcatggtattcggaccaaagaaatcatagaacaggctacctaccgggcttttctggaatgcagtaccgcccatgtgaccaggagtacagaaagtatatttaccttcacgaacatatttaaacagtgctttagtcagcggaggcagaatagtgttgatatattcgtcagtggtctgcttgatcttattagcaatatcttcagcagcacccagcgcatattcaaagaagctaatctgtaaacgcaggtcattcaggcttacatcgagagtggaatacgtattagcgaacgcgtacaacggcaggttctcgttcattttgctaatttcttcgcacagctcgagattatatttatcccagtcaaaaataacgccgcacagacgcgcattgttttcgatcagttttaataagtcgtcacggtcgttcgggtaaacaatctggaagttcagacgttcaagcgcgcgatgaagttcacggatgggttcttctttaaaataaacccccatgtgattcaatattgcaataacgttcatagtcatatctccaggtaaaaaaggcccctcccaacacatgggacaaaatgaaaggaggagcctcggaaaatacttttaattaatgtgcgttagacgcggtgtggttatccatactgtggctctggcgctcgtgcattttgcgagcgtagaacatcaggataatcaggctgacgatgaaggtacctgccagctcgaaggagcttgcgcccatcagcgcgatgaagcagaacacgcaacccagtacagagcagatcaggctgacaaagttgcggatgttaacgccttcaaaacgaatcaggtcaacgcaagagtagaaatacggcagcatagtcagcagtactgcgataccggtcagttcaccgaacaggtcagatgctttaccaccggcagagttcatcagagtgataaggatcatcagggcagtcattttcactgcagccagcagcagaccttttttcggaataccgttgctgtcgacttcaccataaactttcgggaagttaccgtcgttagcggcacgtacacctgcctggcctaccaacatcatccaggagcccagagaagtcaggcacgcaaaggcggtgaatgcagaaaccagcggcgcagcccagttaccgaggatagtactagcactgattgcaaacggagcaccggaagccgccattacagaagacggatacataccggaaagcacctgagtcgcagcgatgtaaacaatacctgctaaaccagtacccagcatggttgccagcggaacggtacgtttcgggtttttaaccataccagtacttacagctgcggattcaacacccacgaaggcccacaggcagagcagaatacttttaatgatcgcatgaccatcagtggtatccgcagtattccagttagctgcataagttgccgcatcaaaccaatgccagccaacaatagcagtcatcaccacaggaataagaaccagcaccagaccaatagtggttaaacggcttacccaagtaccgccgagcatatttacaaaggtaaatacccagacgatagcaatacaggcgatacccgccggaacaggatcatttaatactgggaagaaggtggaaagataagatacagcggtaataccaatcgccaggttaccaatccagttagcatggtaataaagaacacctgtctgaaaaccaaatgcaggggaaatttctccggcataagcaattgggccaccttgttgcgggttttttgttgccagtcgggcatatacatacgccaggctcattgcaccaataatagagataatccaaccccagatagcaataccaccgatacttgctaggttcgcaggtaataatgcaataccgctccccatcatattaccggcaacaacaccggtacaggcaaatagcccgatcttcttggcagaactcatgctcttctcctaatttcatttttgaatttggagtccgggtcatgatgtataactatttcctgaccagaccaaactggcgataagattactcacgaaaaaaggattaatcctaaagattaggtgaaataacacaaaagtttctgtaagtgagaacttgaggttttttattaacacatcaggatcgcaagttgatatcatgaaaagataaacatttaatgtttacaatggattgcgtgacattctctggttaaatttatgtaataaaaattatgcggcaaataaattgccgcaacatattataccaacaggaacatacaaaaactcaacaacaaatatttccgagcataaatcaacccggagttacttattcactagcaagaaatttgtcgagataaggtacaacataaggaacagaagtctggaatataccattttcaatccagtaaagggtgtttgcccctgggcgtaaattaaaggcggtgagatatgcatcagctgcttcccggttcatccccttcatttcataaaccttgccaagcaacacataatttagccaggacatttcaagatcaatgccagtatttatcgcctggtaagactcatctgttttaccttttaccagagcactgaccgcttttatttgatatataatggacaggttgttcaattccggcagtgtaacaatgttatctatttctgtgttcagtgctgctaattgtttttcatctaaaggatgttgagaatggcgcacgatatcaactaatgctttttctgctctcgcgtaggtaaattctggggaactttgaacaatctcacctaataattcactggcacggttcaaacttttatcatcgccatgcagtaaataatcatgtgcctgataaaaattagttaataacgcaccacgatgcggcaaaattttctggagcgtctcctgcattcgttgtggccacggttggtttaacgctttacttaaactctccagtaaatcattttgaatcgccagctgattaccgttagtgatgacataacgtttatccagcatggtactaccatctgcattgtctaccaattttatgctcataaagcattgttgagcacggtattggcgctgattaacaaacgcaatagataatgttttaccggaactgctcggttcatcaatgttgtagttgattttgtcatgcaccataaaggtggagaaggtgttaagacttgtcgccaccaaatcacccacgcctatcgcgtaagagagctgatacggggaactccagctgttacaacttttatttaccatattaatgtcaatatcgcgtggattgagcaaaatacggcttttgctcataggaagacgtgtatcaagactactaaacgctaccagtgctacacagatacctaagctcaacaggaaaaaaaaccatacccaaaaggtagtgaatcgtttgcttttaactggggattgttcaggtggcgttgcggtgttttgaatgttaagactgtgggagggagaatctgtggcaggaaccgcctctggtatagggggagggctagatagcattatttcctctccctcttcttcgctgtaccagataaccggcaccattaatttatagccgcgctttggtacagtagcgatatagacaggactatcttcatcattatcttttaaactcttacgtagttcactgatactctgcgtcacaacgtgattggtgacaatacttctcttccagacattatcgataagttcatccctgctaagtacttcgccactgtgttgagcaaagaaaaccagaagatcgattaatctcggctcaagggtaagttgacgcccattgcggctaatttggtttatggacggagtaacaagccattcgccaacgcgaactacaggttgttgcataatagaaactcattcgaaaagggaatgatgcaatgataattgccacaacctatttttaccatctatagatgggtttatttacatattattggtgaatgcaagacgttatttttaccagccataaacttcttgattacatagtattacgaaaggattttactgagaaccagaagtaatattccttaccatcaaaattcatcatctttgccaaagaaaaatgttcagaaaataatccatggaaaattgtccggagcacttactattttaatggattgttagtctttgcatgagcaagcgaactgatacatttctctttgttctcattcagaaaatctcatcagtcgccgttcagaccggtgttgtgctttatggatgcgttacgctcctgatgacgtcatttgacgttcaacagcatcacggggccgcacgacatttcacgtcagttagtgctatagctcaggaacaaattttcccgaattgggatatgcccgcaaattgctggtgatgtggggagaatctggttgagttcggtagaattgatttggaggcagaacgcttaaatcgtggcgtcctgaaacgaaaaacggacctccgtggaggtccgtttatatgaatttggtgcccggactcggaatcgaaccaaggacacggggattttcaatcccctgctctaccgactgagctatccgggcaacggggcgcattaaaccgtaatctgcacatctcgtcaacctaatttcagtaaaagcgattcaactgcttaagattgcggcaaatcgcttcttttctgtgtttctgtcaggtcaatgcaccaccctggcggcagcgggcgaagcgcaggatatcttccgccagccgatgtgcagtgtcgacatccgcctggctacgattcaccagcattcggcttaaacagccttccagcaccagttccatctgctttgctaccatcgccggatcgtcaacttccagtgtggttaacagttcgtgggtgaaatcgtaggccgcgcttttttgctgatcggccagttgatgaatagggtggccaggatcgggataaaacgtacaggcagcgataaatagacagcccggatagcggttgtttttaacgcactcgcttaacgcctgataacgtgccagcagcttttgttcggcggtttgcgtttcgtccagcatcagctgacgacgccagacatctatctgttggctaagataacgcagcgcatcgtagaggattgcctctttgtctggccagaagcggcgtagctcgtccagtggataatccacacgttcagcaaccatctccagcgtggtgttggcaatcccttgtaattctaataatttcagggcttctcccagtacatcttcacgttgcacgctattttcctccgtctttcccactgcaagtgtcgttcacggttggcgatcgcgcaaatgtgcgctgaaggtttcagcatccataaagcccgtgacgcgtgcttgtggatgctcctggccttgtccgtcaaaaaagagaattgtcggtaggccaaggacattaagatgctttaacagcgccacatcttgtgcgtcgttggccgtgacgttggcctgaagtaagaccgtgtctgctaacgctttttgcacctgcgggtcgctgaaggtgtatttctcaaactctttacaggcgacgcaccagtcggcataaagatctaacatcaccggtttgcctttggcttcaacgagcgcctgatttaactcatctaccgttttgatttgtgtaaagttgagatgcgtctgagtttgcgcggtatgcgtcgcaccaaatgcccaatcctgaagtgggcgcacgctaaccaatgccgctgccagcagaataatttgcacaatacgcatccagccgcgtttagcctgtaggctggtgataaaggcccagccaaagaatgcgacacccagcgcgctccacaagcgtaatccccatacatcaccaatcactcgctccagcaggaagaccggcagtgcgaggatcacaaaaccaaacgcggttttgacttgttccatccacgggccgcttttcggcagcaagcggttaccaaagacggtaattagcatcagcggcaggcccatgcccaacgcatagagataaagcgtgccgccgcccagccacatgttcccgctttgggcgatatacagcagaatcgcgctaagcggtgcggtggtgcatggactacagatcagtccggcaatcgcccccataacaaacacaccgccaggactgccgccctgttggcgattgctcatcaacgtgagacgtgtttgcaggctagaggggagttgcagggtaaacaagccaaacatactcatcgccagcaaggtaaagacgatggcgaggccaatgagcacgtatgggtgctgtagcgccgcctggaactgtaaccctgcggcggcaaccaccagacccagcgccgtgtaggtcagcgccatcccctgcacataaataaaggtcagcaacaatgctctggcagtggagagccgctgtttaccacccagcacgatgccagaaatcagtgggtacattggcagcacgcatggcgtaaaggcgataccaataccgatcaacaacgcccagagcgcggaaaagggcaattgcgcggtgggctgctcttgctgcggaacagacacaggctgtggcgctgcgttgttggcgaccacttcgcttaacggaacggttttggtttctggcggataacagaaaccggcatcagcacagccctggtaggtgacagttaacgtcgctcccgcactcgcctggttgatggtgacgggaagcgtcagccgatcgcggtaaatctcgcttttgccgtaaaactcatcttcatgccagacgccttgcggcagctgcacgtcggcaattttcgcgtgttccggcgtaatgcggatctgtttacggtagaggtagtaaccgtctttgatctgccaggtcagattaaggtcatgttggttttgctgaaaatcaaaagcaaaggcttgatccgcggggacaaattgactacgtcccggcgcgtcgaataatccggcaaaaacggaagtgctgcaaagtagcaggatcagcgtaaagatgcgttgagccatgagaggtaatctgtgtctccttatgtcagcgtaaagatgcgttgagccaactgaggtaatctgtgtctccgtgtgtaacaggtaaaaccagaagttccggggtttgatatggatgatgagacttcaggcattccagcagtgcctgctggtgagatacggtagtttttaaaatcatctgcacttcgtattcttgctccagcttaccttcccagtaatagagagaggtagcgccggggatcaaggtcgcgcaggccgccagtttttccgccagcactttggcggctaaatcctgggctgtcgcttcatctggtgccgtacatagcaccacgacagacgcggtattgctacttttttcatcaagcataaacacctcgcaagaacagatggaaccgcaagagagaggtcactatacaacggacgggggaaggatgttagtcggcgggaaagaaagcggggcgtgaacgccccgcgattgatcattacagcatgaagctacccagcacgaagccgaagcaaacggccagggcaacacccagagtacccgggatgaagaacggatggttgaagacgaatttaccgatacgggtagtacccgtgtcatccatctgtaccgcagcaaccagcgtcgggtaggtcggcagaatgaacagaccagacaccgcagcgaaagaagcaacagcggtcagcggactaacgttcagtgccagagccatcggcatcagtgcttttgcggttgcagcctgagagtacagcagagcagaagcaaagaagaagatgacggccagcagccacggatgaccctgaatcacttcaccagcggtatctttgatccagtcgatgttgttggaaacgaaagtatcgcccagccacgcaacacccaggatacaaatacaggcgctcatacctgctttgaaggtgctggagttgaggatgttgtcggtatcgactttacagataacggtggtcagagttgcaacgctgagcatgatgatcaggattgcgttggtggtgttcatcagcggtttttcaaccagacccatgcttgggctgttgatgattgcatagataaccacgccaactacgcccagcaggaacagccagacggacgtttttgcaccggatttgatttcaatctgcttttcaccgcgcagttcaaccaggccctcttccagacgcttgcgataaatcggatcgtcagagagtttggagttgaacagcatagtgaccaggaaggacatcaccagaaccgccagcagggtggacgggatgaccacggagagcagatggaggtagctgatgccatgaccttccatcacggaagacatgtaaaccactgccgcactgattgggcttgcggtgatcgcaatctgcgcggataccactgcagtagacagcggacggcaaggtttaacgccttgttccttcgcaacttcagcgataactggcagtgtcgccagagagatgttgccagtaccagcaaagatagtcaggaaataggtcacgatcggtgcgaggatcgtgatgtatttcgggttacggcgcagcagcttttctgtctgatgaaccagatagtccagaccgccagcaacctgcatggcagaaatagcggcgataaccgccatgataatggagatgacatcgaacgggatgttaccgggtttaacgccaatagcggcaagaaccagcacccccaatccgcctgcaaaaccaatacctattccccccaatctggcgcccaagaagatcgccagcaaaactatgatgagttctacaactagcatattagccttccttgttttttaacaagttgatattagattgttatttttaagttactgctcacaagaaaaaaggcacgtcatctgacgtgccttttttatttgtactaccctgtacgattactgttcgctttcatcagtatagcgttttgctttgtaagccgggtgcatcagattctgtacggagaaaatatcgtcaagttccgcttcagtcaacagaccgcgttccagaacgacttcacgtacactcttaccggtttcggcacagattttacccacgatgtcaccgttgtggtgaccgatgaacgggttcaggtaagtaacgataccgatagagttgtaaacgtaaccttcgcacacttctttgttagcagtgatgccgttaatgcatttttccagcaggttgtagcaagcgttggtcagaatgtgaacggattcgaacatggcctggccaatgaccggctccataacgttcaactgcagctgacctgcttctgctgccatggtaacagtggtgtcgttaccgatgactttgaagcatacctggttaaccacttccggaacaaccgggtttactttagctggcatgatggaagagcccgcctgcagttccggcaggttgatctcgttcaggccggcacgtgggccactagagagcaagcgcaggtcgttacagattttggacatcttcacagccaggcgtttcagcgcgccgtgaaccataacataagcgccgcagtcagaggtcgcttcgatcaggtcttcagccggtacgcatgggaagccagtaacttcagccagttttttcactgccagcggagagtactctttcggcgtgttcagaccagtaccgattgctgttgcaccaaggttaacttccagcagcagttcagcggtacgttggatgtttttcacttcttctttcagcaggatgctgaaagcgcggaattcctgaccgagggtcatcggtactgcgtcctgcagctgggtacgacccattttcaggatgtcctggaattcgacagctttacgttcaaagccttcacgcagttggttaatcgcatctaccagcttaatcagggaagagtaaactgcgatacggaaaccggtcgggtaggcgtcgttagtggactgacatttgttaacatggtcgttcgggttcaggtactgatattcacctttttggtgacccatcagttccagaccgatattggccagcacttcgttggtgttcatgtttacggaagtacctgcgccgccctggtagacgtctaccgggaactgatccatgcattttccgttgttcaggacttcatcacatgcggcaatggtggcattcgctacacttttaggaatggtttgcagctctttgtttgccatagctgcggcttttttaaccattaccataccgcgaacaaattcaggaatatcactgattttgttgttgctgatatagaagttttcaatcgctctcagagtgtgaacaccatagtaggcatcagctggaacttccctggtacccaacagatcttcttcgatacgaatgttgttactcatgtgaaccttctttttcaagctgccaatgatttgctttaaacacacagaatatatgtggtttcgaatgtttttcgaccgacgattatcccctgcatcgaccgaatacccgagatcatatgctgcttgaggatttctaccgtaatctggatcactttaagtgtcggtttttaccccttaattattaatttgtgaaatagatcaccgctttgggattactaccaaaaatagttgcgcaaacatcttgaaattttgctaatgaccacaatataagctaaacgcgattcgcaacccattcaggtagccggggttaaccggctgctattacaggagaaacctttgcgctggttaccttttattgccattttcctttatgtctatattgagattagtatctttattcaggttgcccatgtattgggggtattgctgaccctcgtgctggttatattcacgagtgttatcggtatgagtctggtacgtaaccagggctttaagaatttcgtgctgatgcagcaaaaaatggcggcgggtgaaaacccagcggcggagatgattaaaagtgttagcctgatcattgctggtttgctgcttttattaccgggcttttttaccgacttcctcggtcttctacttttattgccgccggtgcaaaagcatctgacagtgaagttgatgccgcatttgcgcttttctcgcatgcctggcggcggttttagcgccgggaccggtggcggtaatacttttgatggtgagtaccagcgaaaggatgatgagcgcgaccgccttgatcataaagacgatcgccaggattaatgtcgaaacgccggattatgtggttatgccattttccggcgtttttcgttttggcagcaacagccataaccccgccagcatgatcagcgcatagagacttttccagccgaccattgccagtaacagaacgcataacagcccgccaaccaccgccagtagtcgataacgtccttgcaataatttacagcctgccagcatgcataacagataaatcataataaagatgccattggcataaataataagagcgtccagattgatctctaaagcatgaatcaccaaagtgctcaccacacagcagccgagcaccgcattgagggcattattcgggatatggcgagaagagaggcgtgccaggtagtggtcaggattatgttgcgcctggctccagaccaggcgggcgaagctctgtatataaatgttgagactggcaaagcaggccagatagccaatcacgcaggcaatccataacgctcctacaccgaacaactgcactacaatttttggaaggcttgctgccgccgccattttttcaccataggcgtcgaagtgtaagacgactaccgtacagccccagtagactaatcctgccagcagcagaccaatcatcaaagcacgaggaaaatcacgctctggatttttaaattcgctggcgagatgggcaaatgcctccagaccgacaaaacaccagaacatcacacttaacgcagcaaataacccggtaagttcgatattaccaggtgccggaaaggggatattcgcaggtttgatatcgcccgcccaccagatagcgacaatcagcgcgacgataagtccggcaataacggtttgtagattagcactggaactggcaccgcgagtaccgatataccacaccagcgccagcgtaccgagttctgccaacaacagttgccagctatgccagccaaacatcgcctggccgaacccggcggcaatttgtagtgcggcaggcaaacccacgggaatgacgcttaaaaacagccagccggtgactcgctcaagccggctaccaaacgccataccgacgaagtgcgcgacgccgcctgcgctgggatagtggcgacccagaatcgcaaacacaatcgcaatcgggaacactaagataatcaaaacgggccacgcccacaggctgttattgcccgctaccagcgcagctaacgcaggaacggcaaacacgccagtgcctaataaactcgtgcttagcaggccaatgccctgggccagccccagttcttgtttgagtccactcatgggttgatgtccgattgcgcccaaattttgggcaactgcgtagattttcgatggtagcacaatcagattcgcttatgacggcgatgaagaaattgcgatgaaatgtgaggtgaatcagggttttcacccgattttgtgctgatcagaattttttttctttttcccccttgaaggggcgaagcctcatccccatttctctggtcaccagccgggaaaccacgtaagctccggcgtcacccataacagatacggactttctcaaaggagagttatcaatgaatattcgtccattgcatgatcgcgtgatcgtcaagcgtaaagaagttgaaactaaatctgctggcggcatcgttctgaccggctctgcagcggctaaatccacccgcggcgaagtgctggctgtcggcaatggccgtatccttgaaaatggcgaagtgaagccgctggatgtgaaagttggcgacatcgttattttcaacgatggctacggtgtgaaatctgagaagatcgacaatgaagaagtgttgatcatgtccgaaagcgacattctggcaattgttgaagcgtaatccgcgcacgacactgaacatacgaatttaaggaataaagataatggcagctaaagacgtaaaattcggtaacgacgctcgtgtgaaaatgctgcgcggcgtaaacgtactggcagatgcagtgaaagttaccctcggtccaaaaggccgtaacgtagttctggataaatctttcggtgcaccgaccatcaccaaagatggtgtttccgttgctcgtgaaatcgaactggaagacaagttcgaaaatatgggtgcgcagatggtgaaagaagttgcctctaaagcaaacgacgctgcaggcgacggtaccaccactgcaaccgtactggctcaggctatcatcactgaaggtctgaaagctgttgctgcgggcatgaacccgatggacctgaaacgtggtatcgacaaagcggttaccgctgcagttgaagaactgaaagcgctgtccgtaccatgctctgactctaaagcgattgctcaggttggtaccatctccgctaactccgacgaaaccgtaggtaaactgatcgctgaagcgatggacaaagtcggtaaagaaggcgttatcaccgttgaagacggtaccggtctgcaggacgaactggacgtggttgaaggtatgcagttcgaccgtggctacctgtctccttacttcatcaacaagccggaaactggcgcagtagaactggaaagcccgttcatcctgctggctgacaagaaaatctccaacatccgcgaaatgctgccggttctggaagctgttgccaaagcaggcaaaccgctgctgatcatcgctgaagatgtagaaggcgaagcgctggcaactctggttgttaacaccatgcgtggcatcgtgaaagtcgctgcggttaaagcaccgggcttcggcgatcgtcgtaaagctatgctgcaggatatcgcaaccctgactggcggtaccgtgatctctgaagagatcggtatggagctggaaaaagcaaccctggaagacctgggtcaggctaaacgtgttgtgatcaacaaagacaccaccactatcatcgatggcgtgggtgaagaagctgcaatccagggccgtgttgctcagatccgtcagcagattgaagaagcaacttctgactacgaccgtgaaaaactgcaggaacgcgtagcgaaactggcaggcggcgttgcagttatcaaagtgggtgctgctaccgaagttgaaatgaaagagaaaaaagcacgcgttgaagatgccctgcacgcgacccgtgctgcggtagaagaaggcgtggttgctggtggtggtgttgcgctgatccgcgtagcgtctaaactggctgacctgcgtggtcagaacgaagaccagaacgtgggtatcaaagttgcactgcgtgcaatggaagctccgctgcgtcagatcgtattgaactgcggcgaagaaccgtctgttgttgctaacaccgttaaaggcggcgacggcaactacggttacaacgcagcaaccgaagaatacggcaacatgatcgacatgggtatcctggatccaaccaaagtaactcgttctgctctgcagtacgcagcttctgtggctggcctgatgatcaccaccgaatgcatggttaccgacctgccgaaaaacgatgcagctgacttaggcgctgctggcggtatgggcggcatgggtggcatgggcggcatgatgtaattgccctgcacctcgcagaaataaacaaacccccgggcagaaatgtctgggggtttttcttttggtcatctttctagtataagattcagacacggacgacgcgagtggcgtccagctcattgattatggggaataacatgcacgtaaaatacttagcagggattgtcggtgccgcgctactgatggcgggttgtagctccagcaacgaattgagtgctgccggtcagagtgtacgcattgtggacgagcagccaggcgcagagtgccagctgattggtactgcgacaggtaagcaaagcaactggctttccgggcaacacggagaagaaggcggttctatgcgcggcgcagcaaacgatctgcgcaaccaggcggctgcaatgggcggtaacgtgatttatggcatcagtagcccgagccagggaatgttgtccagttttgtcccgacggatagccagattatcggtcaggtttataagtgcccgaactgatgtgatccagaggctgggtgacaaacgtataattgcctgatgcgcttcgcttatcaggcctacataaggcattgcaactgattgaatgcttgagaatttgtaggccggataaggcgtttacgccgcatccggcatgaccaacgatcacgttatcagtcatttcaggctggatggctccagcctcgcattagcaaagatgagattatttcgcctgtggtgcagttttgctggtggattgaacacgtaagtgatgcagcgcgcgtaagcattgatcctgggttagcggttgggcgttattcgccgctacggtgcgaacatagacctgacatggcacacccgcgagttttttcagtcgtgggctgaaatcaagcattcggcgagtgatcgcttctatttctttacccggcgttgcttcacgcgttttcaccactgcgccgctaaattgttctttgccactttcatctttaaagcggtaaagcaccgccagataatggtcgaacaagttatgtttccattccggttgggaataggtgtcatattccagattgccattgtcctggcagtcaacgtcgtataacggcaggaaatctaacagactggtaatacgtaatgccagttcacgcatttccgcattattaattgcatgaatgattgctcgcgccagcatttcaatctgcaactcattgacgactaactcacatttgctaccgtcatgtagcgttaatacgaaggtaagattttcgccttgattatcggtaagttccagcgtgttaacccgacgattaatatcggcatttttaagctcatcaaccagaatttctgggatgttttctgccattttcttaatgactttatcgcgagcttgctcatactgaaggtgtgcagcagcatccagtttatgcttttgatgcagacgactttccagcgcaatcagcaggtcgcgcagttccatgacagacataaagaacaagctttctttattgcgaggttctttaattttcagcgccagtgcaatgaaattattactcttgcgaataacaccggtattaacacccttgatgcttatggccatgtaggttctccctaaccatttctcaattaaataattaattttaatttataagccagataaatgggcttggtagtaatagttgttaaaataacataaatagccgtactcactctatataaacagaaaagaaaggttaattattggtgttagctatataaaaagtaacaacagcaatgcatatgaataattaaaggttatgcaacgggcaaagattaaacttcccagtttaatgacaggttgctgtacttgcgtttgttgctcttgccggatgcagcgtaaacgccttatccggcctacagttcattgcaaatccattcaatttcaatgcacgatgtaggcctgataagcgtagcgaatcaggcaattttaatgtttaacttccctgtttaatcagttactgctggcgtagctggagatccagcggcgttttgctgggttcgccgccaatttctcgcgccagtttcggcaccagatatccgctcaccagtgtcagcaactcacgcataatctgccgtgcttcgtcatcactcaccataaaatgcgccgcgccctgtactttatcgagcacatgcaggtaatacggcattacgccggcatcgaacaacgcattactcaggtttgccagcgtttgtgcgttatcgttcacatcacgtaacagaacgctctggttcagcaaagtaacgcctacccggcgcaacttagccatcgcctgacggaatgtttcatctacctcattggcatggttgatgtgattcaccagcaagatttgcagcgtagaacgggcaaagcattcaaccagcgcctcggtgatacgtgccgggatcacaatcggcagacggctgtgaatccgcagacgttttatatgcgggatggcttccagttgtgtgagcaaccagtccagctcgtgatctttcgccatcagcggatcgccgccggagaaaatcatctcgtccagttccggatgcgcagcaacatactcaagtgcagtttgccagttacgcttgttgccctgattttcggcataggggaagtgacgacggaagcaatagcggcaatttaccgcgcagccgcctttgaccagcaaaagcgcccggttgtggtatttatgcaacaaaccaggcactacgctgtgctgttcttccagtgggtcggtggagaatccgggcgcgatgacaaactcatcttggctggtaagtacctgacgcaaaagaggatcgtccggattgcctttctccatgcgatcgataaaactgcggggcacacgcagggcaaaaagctttttggcgctgcgtccggctaacagtttttcctccgcgtctatattcaaaagacgcagaagttcatcaggatcggtcacaacatcggcaagttgcgttaaccaatcttctctggatggggtatttagggttacaatatgcgccattttgtggcttagctaccaattaacaaatttcagagggccttatggcaacgtactatagcaacgattttcgtgctggtcttaaaatcatgttagacggcgaaccttacgcggttgaagcgagtgaattcgtaaaaccgggtaaaggccaggcatttgctcgcgttaaactgcgtcgtctgctgaccggtactcgcgtagaaaaaaccttcaaatctactgattccgctgaaggcgctgatgttgtcgatatgaacctgacttacctgtacaacgacggtgagttctggcacttcatgaacaacgaaactttcgagcagctgtctgctgatgcaaaagcaattggtgacaacgctaaatggctgctggatcaggcagagtgtatcgtaactctgtggaatggtcagccgatctccgttactccgccgaacttcgttgaactggaaatcgttgataccgatccgggcctgaaaggtgataccgcaggtactggtggcaaaccggctaccctgtctactggcgctgtggttaaagttccgctgtttgtacaaatcggcgaagtcatcaaagtggatacccgctctggtgaatacgtctctcgcgtgaagtaatgcggttgtggtgcggcctgcaggctgcaccatcacttattcaggtcagagatgatgaaacgccttatcgttcttgttttgcttgccagcacgctgctcacgggctgtaacaccgctcgcggtttcggcgaagacatcaaacatctcggcaactccatctctcgcgctgccagctaatttttcttctcttccgaaaaatcatcagattcccatcatttttggcgatgttgtctattattaatttgctataggcaaacataaataacattacctaaaaggaagacgttatggtgaagaagacaattgcagcgatcttttctgttctggtgcttagtacagtattaactgcctgcaacaccacgcgtggcgttggtgaagacatttctgatggcggtaacgcgatttctggcgcagcaacgaaagcgcagcaataagcaataacggtacgacagctgtgtcgtgccgtttgttttttctgcgatagtcacaaaggtaatagttgaaattcccctgccacctggcaaaatatccgttcaaccatcagctttgcaggacgacctgcaaacgcctcttttcaccggggacggccccaattctccggagcctgatatgtcctggattatcttagttattgctggtctgctggaagtggtatgggccgttggcctgaaatatacccacggctttagtcgtttgacgccgagtgttattactgtgacggcgatgattgtcagtatggcgctacttgcctgggcgatgaaaagcttaccagtagggacggcttatgccgtgtggacgggtattggcgcagtcggcgcggccataaccggcattgtgctgctcggtgagtccgctaacccgatgcgcctggcgagtctggcgttaatcgtattggggattattggtctgaaactcagcactcattaactaccaggctgctgtacccaaataaatttactgacatcaaacccttcccgggtcgcgactgccagcatctcctgtttcacttcgtcagaaatggttggcgtgcgggagagtatccacaggtagtcgcggtccgggccgcaaaccagcgcatggcggtattcccgatcgagtgcaataacgttataaccgccatagaaaggaccaaagaaactcactttcagcgcagcgcgagttggtgcgccggtaaagtacgctttcccttcactctgctgccacattcctctgtcagggttatagcctttattaatgacattcaggccgccgtcatcacgcaggctgtatgttgcggtgactttttccagtccacgttcaaagcggtgatcaaaacgggcaatctcataccaggtaccgagataacgtttggcgtcgaaattatttactacggtcacgccacgcggcggcgtaggagaactgcaggcaacgaccagaaatgcagctgtcgctgcggcaacgagagggagcaggcgcataaatgtttccttactggtttttttctaagtgtagatgacagcaaggaaaagcggagaaaaggtccgaaaattcggacccgatggaattttactgtagagcgttaagaatctgccaggcggcgtcgactctcgctggattgggatagtttttgtttgccagcatcacgatacccagctctttttctggaataaacgcgacatagctaccaaatccgccggtcgcccctgttttatgtacccaacttgcgcgtactgcaggagttgggggcgtaatcgcttttacggggcgtgctgccagtgcaattttattgtcactgccgttaatgatgctgtcaggatttaccggccagtccagcatttcccagcccaggccctgatacatatcgccggtttgccagtagcgagattgtgccagttgtatcccttgttgaagcgttttctcattgatatcaaggggttttaaattgctttgcacccagcgggccatatcttcaatggtgctcttcacaccataagcttcagcatctaacgccccagggctaacatgcactgccttaccttcgcgatatccccaggcgtaattcttttcttctgcgggcggtacattaatccacgtatggttgagtttgagtggctggaagacacgagtttgcatcgcctgctcaaaactcaaaccagacggcttcacagccagtgcgccgaacaaaccgatactggagttggcatacagacgttgtgttcctggagcccatgcaggctgccagttttgatagaagcgcagcaagtcgctactggatttcacctcatccggcacctgcaatggcaggccgccagcagtgtaggttgcgagatgtaatagtgtgatcccattccactgtttagcggtaagttcaggccagtattttgttgtgggatcgcttaacttgatttcccctcgagcaatagcgtcgccaccaagcacgccagtaaatgttttgctgacgctacctaactcaaacaacgtttgctgtgtgacgggctgctttttggcgatgtccgcatagccccaggtaaagtaataaggtttaccctgataaattaccgccaccgccatacccgggatcttttgttgctctataagcggggtaattgtgcgatgcacaatatcgttgatttgttgaggggcagcaaatgtggagcaagaggcggtaattaataaggcgcagagcgtcgttttgaacatagggtctggtttccatacaaaacggcccgccataggcgggccggatttacattggcgatgcgttagattgtaacgacaccaatcagcgtgacaactgtcaggatagcagccagaccgtagaaaacccatttgcccgcaggtacgtggattttcagatcgtgcatcgcgtggtgcatacggtgtaaaccacaccacagcggcagaacgatcatcaggaacaggaatacgcgaccaatgaagctctgcgcgaacgccagaacgcgctcgtagctcagcgcatcacccggaaacaaccccagtggcagcagaatacccaccagcaggatcatcaccggcgcaatgatggcgctccacataccaccggccccgaagaggccccagaataccggttcgtcagaacgctttggatttggattaatcatctcaggctccttaccagtacagggcaacaaacaggattacgatggtggcaaccacagttaccgcccagagacttttgataattggctctggtcccattttttcgtcttttacaatgatattggccgctttcggtgccagttcaaaccaggttttggtgtgcagcagagctgccgccagagtgatcaggttaatgatcacgataaccgggttttgtaaaaagtcgacgaatcccgcccaggcttccgggccatttttcagggcaaacagcccgaaaatcagttcaatgctgaaccacacagccggaaccgccgtgccttcgcgcagcatgtaaaagcgataaaacggcaattttttccaccaggtggacgtcattggccgtacatacggtttacgtttagtcgtcatgttgcactccttagcgtggtttcagggtcgcgataagaaagtctttgctactttctactttgccctgctgaatggccgcagccggatcgacgtgtttcgggcagacttcggagcagtagcccacgaaagtacagctccatacgccgttctggctgttcaactgcgccatacgctccttcttaccgtggtcgcggctatcttcgttataacgatgcgccagcgtaatggcagccggaccgatgaactctgggttcaggccaaactgcgggcacgcggcgtagcacaaaccacagttgatgcaaccggagaactggtgatacttcgccatctgcgccggggtctggatgttagtaccctgatccgcggtgcgggagttgccgatgatgtacggtttgatcgcttccagactttcgatgaagtgggtcatatcgaccaccagatcgcgttcaatcgggaagttagctaacgcttcaaccttcataccgtcggtgtaatcacgcaggaaggttttacatgccagttttggcacgttgttaaccatcatgccgcaggaaccacaaatcgccatacggcaggaccagcggtagctcaggtccggtgccaggttgtctttgatgtagcccagcgcatccagtaaactggtagttgcgtcataaggcacttcatagaatgcgctatgcggtgcggtatcgacttccgggttatagcgcaccacctcaattttcaggtttttcatctcagccattcgccttctccttcttattggctgcttccgccttatcggctgcatccgcttcgccaccgtaaacgcgtttagctggcggcagcgtagtaatcttcacgtcgctgtactccaggcgagtcgtgccatcagcatcgcggaaggcgagggtgtgtttgaggaagttgacgtcgtcacgctcggtgcaaccttcgtccagacgctggtgcgcgccgcgggactctttacgtgccattgcggagtgcgccatacattcagcaacgttcagaccgtggcccagttcaatggtgtagagcaggtcggtgttgaacacgctggaagtgtcggtgatgcgcacgcgcttgaagcgttcctgcagctctgccagcttgtcgatggttttctgcatcagttccggcgtacggtagataccgcagccttcttccatagccaggcccatttcgtcgcggatcttcgcccagttttcgccgccatcctggttaaccagatctttcagacgttgttcaacgccagctgcctgcgcttcaattgccgcttcgttgccattaccggcagttgctgcacgctctgtcgcttgttcaccggccagacggccgaagaccaccagttccgccagggagttagaacccagacggtttgcaccgtgcagaccaacagaggaacattcacccacggcgaacagacctttaatgcgggtttcacagttctgatcggtttcgataccgcccatggtgtagtgtgcggtcggacgtaccggaatcggttctttaaccggatcgacgccaacgtacgctttcgccagttcgcagatgaacggcagacgttcatgcagttttttctcgccgaggtgacgcaagtcgagataaaccacatcgccacgcggcgtggagatggtgttgcctttacgccattcgtgccagaaggcctgagagactttgtcgcgtggacccagttccatatatttgtttttcggctcgcccagcggagtttccgggcccatgccgtaatcttgcagataacggtagccatttttgttgaccagaataccgccttcaccgcggcaaccttcggtcatcaggataccggaacctggcagaccggttgggtgatactgaacgaattccatgtcacgcagcggaacgccgtggcttagcgccatacccataccgtcaccggtaacgatgccgccgttggtgttgtaacgataaacgcgacccgcaccgccagtagccataacgaccgcgttagcacggatctgcaccagcgtgccttccatcatgttcattgctaccaggccgcgaacatgaccatcatcaaccagaatatccagcacgaaatgttcgtcaaaacgctggatctgcgggaattgcagagaggtctggaacagcgtgtgcagcatatggaagccggtcttatcggcggcgaaccaggtgcgctcgattttcatgccgccgaagcgacgtacgttgacgctaccatccgggcgacggctccatgggcatccccacagttccagttgggtcatttcggttgggcagtggtggacgaaataatccacgacatcctgctcacacaaccagtcgccacccgctactgtatcgtgaaagtgatattcgaagctgtcatgatcctgcgcgacagcggcggagcccccttctgcagcaacggtatggctacgcatcgggtatactttactgattagtgcgatttttgcattcggatttgcctgcgcggcagcaattgcagcacgtaatcccgcgccaccggcgcctacaatggcaagatcggcttgaaaggtttgcacgacattcctccagattgtttttatcccacagccacgtacttcagggtaagtacctgaaagttacggtctgcgaacgctattccactgctcctttataggtacaacagtatagtctgatggataagtctgaaatttgacgagatcgatttttttagtgcgcaagagggctaaattatcactgaagatgattaatttaattactaaaccatcagatcgtgctttttttagtcactgcccaccgctgtttgattcctgcgtaaaatttgtctcgccgtcgcgttgcgagtagacttcgtgcccttgtcaaaaactggagatttaactatgagcgaaacggcatcctggcagccgagcgcatccattcctaacttattaaaacgcgcggcgattatggcggagatccgtcgtttctttgccgatcgtggagtgctggaggtggagacgccttgtatgagccaggcgacggtaaccgatattcatttggtcccgtttgagacacgtttcgttggccccgggcatagccaggggatgaatctctggttaatgaccagcccggaataccatatgaaacgcctgctggttgccggttgtgggccggtattccagctgtgccgcagcttccgtaatgaagagatggggcgttatcacaaccctgagttcactatgctggagtggtatcgaccgcactatgatatgtaccggttgatgaacgaggtggacgatctcttacaacaggtgctggactgcccggcagcagaaagcctttcttatcaacaagctttcttgcgttatctggaaattgacccgctctctgccgacaaaacgcaactgcgggaagtcgcagcgaaactggatttgagcaatgttgctgataccgaagaagaccgcgacacgctgctacaattgctgtttacctttggcgtagagccaaatattggcaaagaaaaaccgacctttgtgtaccactttccagccagccaggcaagtctggcgcaaatcagtaccgaagatcatcgggtcgctgaacgctttgaggtttattataaaggtattgagctggcgaatggtttccatgaattgacggatgcccgtgagcagcaacaacgctttgaacaagataaccgtaagcgcgcggcgcgcggtttgccgcagcaccccattgaccagaatctgattgaagccttgaaagtcggtatgcctgactgttccggcgtggcattaggtgttgatcgtctggtgatgttggcgctgggcgcggagacactggctgaagtcatcgcctttagcgttgaccgggcataattctgaaaaattactgaattaacagcgaagaatggcgtgataagcgccattctgtagcatatgttttcatttttccgttaaaggccacaatttaagactggatatttgatatcatccaggtatcaattctgtattggtttttacgctgcctgctcaatgttgcgcagtgcagttcagtgggcacgtgttatacacgcgctgaaatgaaggatggtttcatgcctcacacgataaaaaagatgagtctgataggactcatattgatgatctttacttccgtatttggatttgccaatagcccaagcgcttattacttaatgggttatagtgcgattcccttttatatattttctgcattgttattctttattccattcgccttaatgatggctgaaatgggagctgcttatcgcaaagaagaaggcggtatctattcctggatgaataatagtgtcggaccacgttttgccttcattggtacgtttatgtggttttcctcttatatcatctggatggtgagtacctccgcgaaagtttgggtaccgttcagtacattcctctatggtagcgacatgacccagcactggcgtattgccggactggagcctacgcaggtggttggtctgctggctgtggcatggatgattctggtcaccgtcgttgcttctaaggggattaataaaattgcccgcattactgcggtgggcggtattgcagtaatgtgtctgaatttagtattgctgttagtaagcattactattttgttattaaatggtgggcatttcgcgcaggatattaatttccttgcaagtccgaacccgggttatcagtccggtctggcaatgctaagctttgtggtatttgccatttttgcctatggcggaattgaagcggttggtggtctggtcgataaaacggaaaatccagaaaagaactttgccaaaggtattgtttttgccgctattgttattagtatcggttatagcctggcaatatttttatggggcgtcagcacaaactggcagcaggtattaagtaatggttccgttaacctcggcaatattacctatgtgctgatgaagagccttgggatgacgctgggtaatacactgcatttgagtcctgaagcgagtttgagcctgggcgtatggtttgcgcgtattactggacttagcatgttcctcgcctataccggtgcgttctttacgctttgctatagtccgttgaaagccatcatccaggggacgccgaaagcattgtggccggaaccgatgacgcgcctgaatgcgatggggatgccgtctatcgccatgtggatgcagtgcgggttggttactgtcttcatcctgctggttagctttggtggcggtaccgcaagcgcgttctttaacaagctgacgctgatggcgaacgtgtctatgacgcttccttacctgttcctcgcgctggctttcccgttctttaaagcacgtcaggatctcgacagaccgtttgtgattttcaaaacgcatttgagcgcaatgattgcgacagtggttgtcgtactggtggtgacatttgcgaacgtcttcaccatcattcaacctgtggttgaagccggagactgggacagcacattgtggatgattggcggccctgtcttcttcagcctgttagcgatggcgatttaccagaactattgcagcagagtggcaaaaaatccgcagtgggcggtggaataacccgatgccctatcgtctacctgacgatagggcgtaaagacaggaaatgttatggatgacaccagccgggacccggcaataaccgaagatgaaatcagggcgctgcaattttctgccggggatgtagcggaaatagagcagacgattctctcttttgtcgatgcctgccacacccgtaaagtggcgatggtggtgggtagcaccattaacaccctcaaagatcgcgatggtaaacggtggggaaacctgccggatatttattgcgcttatcttatccgatgtctggtttttcgcggggaattagtgggatacggcgatttgtttcgtatgcgctatagcgaaattaagcgaccggttaccttatgagtgcgcgcatgtttgtcttatgctgcatctggtttattgtggcgttcctctggataaccatcacttccgcgctggacaaagagtggatgattgatggacgcgggattaacaacgtctgcgatgtgttgatgtatctcgaagaagacgatacccgtgatgttggtgtgataatgacgttaccgctctttttcccttttctctggttcgctttgtggcgaaaaaaacgcggctggtttatgtacgccaccgcgctggctattttcggctactggctgtggcagttttttctgcgctatcagttttgtttgtgagccggattggttcatccggcacacaaacttacaaacttcccgcctgacgacctttgcccgcagacgtcagcgttctccccgtttgtttaccgttgaggctttccagacgcatctggaagggcgggaatggcatatcgataccgtgggcatggaagccagccagaatcagctggtggatctcatggcgtagcggcatacggtgacccatctcagcggcgtaaatacgcagctcgaaaatctgaatcccctgttgcagatccaccaggaagacttccggtgccgggttgtcgatcaccaggctgcagcgacgcgctgcggtgagcaggatttccgtcacttcttcgctattggcatcggcaggggccggtatcgtcaacaccacgcgcgtgacgctgtcagagaggctccagttgataaactgctcggtaataaacgccttgttcggcacgattatctctttacggtcccagtcgctgatggtggtggcgcgggtgttaattttcgtcacgctaccggtgagatcgcgaattgtcaccgtatcgccaatgcgaatcggtttttcgaacaggataatcagaccagagataaagttggcgaaaatttcctgcaaaccaaaaccgagaccaacaccgagcgcggcaaccagccactgcaatttgctccactcaataccaatcatactgaagccgaccagcccgccaatcagcatcagcagatatttggtgatggtggtgatggcgtaacccgtacccggcgttaaatccaggtgctgcaaaatcgccagttccagcagcgcgggcaagttgcgcaccagctgcgtggtgatgataaacaccagaatggcaatcagcaccgcaccgagggtaattggctccagactttctacgccctgtaccgtggaggtgacatcccacaggctaatattttcgaggaagccgaaagcggaatggatttcactccacagcacaatgacagaaagcagggcgatcaacatcaaaatactgcgcaccagccgcaaggattgcgcactgatggcatcgagatcgacttcgctttcatcgacttcaattgctccttccgggctactgtgatgatgcgcttcctcttcgccacgcgcacgttgcgctaacatctctgcccggcgatgcttcgcccgatcaaacgccagcctgcggcgctggatcagcatccagcggcggataacgtgataaaccaccagtagcaggaaccagatggcaacgctggtttcaagcctcgctaacagcgcctgtgccgttgccagataacccaccgcgctcgccagaatggcaaccaacggcgcgccaatcatcatgttccacagcatatggttggtaatgttgtcgccgctgccctctttgttgagatacagcggaatcccggcctttttcaggctgagggtgaccaccgccagcgcaccgcaaatgaggataaagcaaagccgtcccaggctaccggagaattcacggtcgtcgaggttatcgaacatcatcagcgccataatcagcggcacaataagcccgatgctcatcaggtagtagcgcatcccacgggaaacacgttcgcgcggccagccaaaatgagcgataaacaagccgttcgggcgggcaaaggtggcgcaaatcatcactacccacagcagcggcacggtggccgttacaccatcgccaatcgcgaccgccagcggataaggccacgcctcgcgcaagccgtaacccagcgtcatccacagcaccggtaacggactcgcgacgagaatgctccagaaaagagtgcgcaacgtcagccagaagtgatcctgagtcactttgccaactttcgccgcgctacgttcaagaaaacgggtgaaatagcggcggctgtaaatactgcaaccgaccagaatcaacgcgccaaacagcggcaaaattgtctctttgctggtcagcatcatcacactggctttgcccaactgactgaaggtgtccaggctaatgagacgacgcagatcctgggcgatttccagcggccaggcgatggtcatcgggcgcacgtcagaggtccagaacagatagcggtgcgttgcttcgttcacctctttcagcgcatcctccagttgcccgttggagactttcagcttggtcagttccaatagtagcgtgtcgccaccctgcaacaaactgttcagcaactcacgctgagtgcgcagttgtgcttccagaatacggttttgctcggcagtcagcggctgaccgtcggcctgatgaatttgccgtagcagcggctgtttattaagcagatcctcataacgtaaccgttgcacacgcaactgcgccatttcggtatcaagctgttgtggtttcggcatttccggcagccgtgccacctgcgcccgcagcgcttcgccgagcagattggagcttcccagccattggctctgttcacgcagcgtattcaacgcctgccggacctgtaacgtctggctggcagcctgacgctgttggctggcaacgagatccatccgctgcgcctgttgattcaaagccgcgcttagttcgcggttaattttgaattgcgcgacgatatctttcggcaaatcggcgctgttttctgccagcaattcggtactttccagcgcccgctccgcctcaagctgacgttggctgtttaattgattacgcaaggcctgcaaatacgcatccagttgctggctctctttttccgccagctcactgcgtaagcgcgctaattcctggcggttattggcagacagctgcgccagctccagttcatcaacgagcgccttaagacgtgcagagtcagactgcaacgcgaaattttgtgcctgattgagcggagtattgccggtaagcgttcccaggcggcgctcgatctcatttaactgacggcgggcgtcggtttgctgttgcggcagttgattcaggctatcggcaatctcgcgggcgcgctcctgctcttgctgggcctgacggcttttatccagcaactggctgctgacctggagaatttcctgattcagcgcgtcggtagacattcccgggctcacgctgcgcggctcgtcacgcatgttgtttaattgtgcgcgcagagtagcggagagtttcggataattatcgataacttgctgatattgtttgatgcgctcaagggaaccttttcgttcctcaagcgcatttaaggcagactggagcgcctctacgacttccggctgtgcgggtttcgccgcttttgcctgctccagttcctgagtgatttgtttgctatcgggggccgtcgcggcgtacgccccccaactgaggcaccaggccatcagaaaagtgataatcaggcgcacgtcagcgtttcctttgatggattagacctggtcttttttgtcgtcaaccaatgggctggcgtcgtgttctgcttcgatctcttcagcaggaagcggggcaggttcagcgtctggcgtaacaaaggtttcggtagatactgccagcggctggccaattttcgtgacagacaggctttccagttgctcaaccagattcactttacccggtgcaaacaggttgataacggtggaaccgagtttaaagcgacccatttcctggcctttcagcagtgccacagaaccgtcgttttccccggcaggccaggtccagcgcttgatgataccttcgcgcggcggcgtaatggtgcccgcccagaccgtctcaatgctgccaacaatcgtcgctccgaccagaatctgcgccattgggccaaattcggtatcgaaaaggcaaatcacgcgttcgttacgggcaaacagattcggcacgttctgagccgtgagatggttaacggagaagagatcgcccggcacgtagatcatctcacgcagaataccgttgcacggcatgtgtacgcggtggtagtcacgcggggagaggtaagtggtcacaaacgtaccgttgcggaacaggtccgccatcagatagttgcctgccagcagggcttcgaggctgtagttgtggcctttggcttgcaggattttatcttcttcgattttacccaactggctgataacgccatcggcaggcatgaccagtacattcggatcggtatcgattgggcgtacttcgtcacgcagcggacggacaaagaattcgttaaaggtgcggtagctggcggtgtccggcttttgcgcctctttcatgtcgaccttgtagtatttaacgaacagatcgataaccagttttgtcagccatcctgcccgcttgcttgcgccccaacccgccaggcgagtaagccatagtttcggcagaatgtactgtaggctaagtttaaaactatttaacaaggtagcctccaggccattgttttgtcgttcctgatccggcctacatgccggatcctgaaaaaaaggggacgattctaacgacggttagcttaattgtcagtcatccgtatcagaaaagtttttacgcgtttttacctgcgccatgctttccagaatacggtgatagttttcgaaacgggtttccgcgattttcccttcctcaaccgcttcccggatagcgcagcccggatcggtatcgtgtttgcaatcgcgatatttacacagacctaaatagtcatggaattcgacaaagccctgagtgatttgttccggctccaggtgccagaggccgaactcacgcactcctggggagtcaatcacatcaccgccgtgcgggaagtgatacagccgagcggcggtcgtggtgtgctgaccgagcccgctgttgtcagagatatcgttggtcaggatctctttttgcagccccagcaacgcattcagcaggctggatttgccgacgccagactgcccggcaaaaatgctgatgcgcccggtcaacgcctcttccagcggttttagcccatcctgagtatggctggaaaccatcaatacgcgataaccgatattgcggtagatatccatctgctcgttgacgaacgccatgccttcgtcgtccagcaggtctatcttgttgagcacaataatcggctcaatctgcaaggtttcgcaggccaccaggtaacggtcgataatattgaggctcagctccggcaaaatggcggagacaatgacaatctggtcgatgttggcggcaataggttttacgccgtcgtagaaatccggacgcgtcaacacgctggtacgctcatgcaccgcttccacgatccctttgacatttacgccttccgccgccggtttacccggacgccagactacgcggtcgccggttaccaggctacggatggtacggcgaatattgcagcggtgaacgtcgccatcggcggattccacatcagcgtgcataccaaagcggctgatgacgataccttcatcaggctcgccaaacagattgtcgtcgtagtcgggcttctccttagacgttttaagacgacgctggtgattggcgttcacgcggcgctgctggcctttggagagtttatttttactcaatcgtacagactcctggtcgcccctgatgggcaaaacatctatgatacacgcaattgtggatcaatatagtcactgtgaatgggtggaaaatagcatgagtgccaatgaaaacaacctgatttggatcgatcttgagatgaccggtctggatcccgagcgcgatcgcattattgagattgccacgctggtgaccgatgccaacctgaatattctggcagaagggccgaccattgcagtacaccagtctgatgaacagctggcgctgatggatgactggaacgtgcgcacccataccgccagcgggctggtagagcgcgtgaaagcgagcacgatgggcgatcgggaagctgaactggcaacgctcgaatttttaaaacagtgggtgcctgcgggaaaaagcccgatttgcggtaacagcatcggtcaggaccgtcgtttcctgtttaaatacatgccggagctggaagcctacttccactaccgttatctcgatgtcagcaccctgaaagagctggcgcgccgctggaagccggaaattctggatggttttaccaagcaggggacgcatcaggcgatggatgatatccgtgaaagcgtggcggagctggcttactaccgcgagcattttatcaagctgtaaaatttttcctggtcacgtaagcgccggaatccacttgcggcggcgtgattttgacgctaaattgaacgtcttgctgataatttcagcacttgagataaaaacgcaaaaaaaacttttttggggggttgcagagggaaagatttctcgtataatgcgcctcccgtaacgacgcagaaatgcgaaaattacgaaagcaaaattaagtagtacgcgggaatagctcagttggtagagcacgaccttgccaaggtcggggtcgcgagttcgagtctcgtttcccgctccaaaatttgaaaagtgctgcaaagcacagaccacccaagcgggaatagctcagttggtagagcacgaccttgccaaggtcggggtcgcgagttcgagtctcgtttcccgctccaaaatttgaaagtgctgtaaggcacagaccacccaagcgggaatagctcagttggtagagcacgaccttgccaaggtcggggtcgcgagttcgagtctcgtttcccgctccaaattcttctctcaataaaatatccacagcgacgcgatgcgttattgctggtttttgttgtctctgacaaactcttgtaaacagagttatccacagcctcaggctgtaatcttaatttcaaagaaacttcgcacggtgaatagtatttttttaacctattgatagataagttaaaaattaagattccgttttgtcgagtcgatcacttgacgattttattcgtcttgaattgcaatgcgtttttatttttattcacaagctgtggatgaatcaggcgtcacgcggtaaccctttttcaatcacccgaaccagacgctgttttttcggcaattgcacttcgactatgcacgcatttcgtctctctatttgctgcgcaatcgcccacgctatgtgctcatcgagaagtgggtgctcacctttacgactttccagcgctgtcaaaatcgtttcatcccaaggggcattgcctaatgctacggcgatattacgcagccaacgcaggtgaccaatacgacgaatcgcgcttccttccgtgacttttaaaaacttctcttcgctccaggcgaataactcaatgagttccggtgcgtgtagcggcttacgcgggctgaaatcctcttctgtggtgagttgactatagcgattccacgggcagataagctggcagtcatcgcaaccgtaaatacggtttcccattaacggtcgcaactcttccgggatcgccccttcaagttcgatggtgagataagagatacagcggcgagcatcgacggtatatggctcgacgatggcaccggtcgggcaaatcgtcatacaggccacgcatttgccgcatccttcctcgactggttgatccacgggcagcggaatatcgaccagcaattcgcctaaaaagaagaagctaccggcctcgcgattgaggataagactgtgcttacctgtccagccgagcccagctttttcagctaacgggcgctcgagaataggcgcagaatcgacaaacggtctaaaattcaggctaacacaatgttgctgaatcatctcgcccagctttttgagtcggttgcgcagaagtttgtgatagtcacggcccagcgcataacggctaacatagccgagtttggggtttttcagcgtgctggcaaatgcggcgttagcaggaaggtaattcatccgcacgctgatcacgcgcagcgtaccgggcaataactcatgagggcgagcgcgcagcataccgtgacgtgccatccagtccatttcgccgtggtattgtttgtccagccatgcttgcagtttgggctcggactcgctgagatcggtatcggtaatacctacctgctgaaagcccagttccagcccccactgtttaattttttgcgctaactgattgagatcgaggggctcactcatgacggaccatacaatgaagaaaaaccccgtaagtataccacacaccgtctggtacgccgacgatatccgccgcggagaacgcgaggcggcagatgtgctggggctcacactctatgagctgatgcttcgcgctggcgaggccgcattccaggtgtgtcgtagcgcgtatcctgacgcccgccactggctggtgctgtgcggtcatggtaataacggcggcgatggctacgtggtcgcgcgactggccaaagcggtcggcattgaggtcacgttgttggcccaggagagcgacaaaccgttgccggaagaggccgcgctggcacgcgaagcatggttaaacgcgggtggcgagatccatgctagcaatattgtctggcccgaaagcgtagatctgattgttgatgcgctgctcggtaccggtttgcggcaagcgccccgcgaatccattagccagttaatcgaccacgctaattcccatcctgcgccgattgtggcggttgatatcccttccggcctgctggctgaaactggcgctacgccaggcgcggtgatcaacgccgatcacaccatcacttttattgcgctgaaaccaggcttgctcactggaaaagcgcgggatgttaccggacaactgcattttgacagtctggggctggatagttggctggcaggtcaggagacgaaaattcagcggtttagtgcagaacaactttctcactggctaaaaccgcgtcgcccgactagccataaaggcgatcacgggcggctggtaattatcggtggcgatcacggcacggcgggggctattcgtatgacgggggaagcggcgctgcgtgctggtgctggtttagtccgagtactgacccgcagtgaaaacattgcgccgctgctgactgcacgaccggaattgatggtgcatgaactgacgatggactctcttaccgaaagcctggaatgggccgatgtggtggtgattggtcccggtctgggccagcaagagtgggggaaaaaagcactgcaaaaagttgagaattttcgcaaaccgatgttgtgggatgccgatgcattgaacctgctggcaatcaatcccgataagcgtcacaatcgcgtgatcacgccgcatcctggcgaggccgcacggttgttaggctgttccgtcgctgaaattgaaagtgaccgcttacattacgccaaacgtctggtacaacgttatggcggcgtagcggtgctgaaaggtgccggaaccgtggtcgccgcccatcctgacgctttaggcattattgatgccggaaatgcaggcatggcgagcggcggcatgggcgatgtgctctctggtattattggcgcattgcttgggcaaaaactgagcccgtatgatgcagcctgtgcaggctgtgtcgcgcacggtgcggcagctgacgtactggcggcgcgttttggaacgcgcgggatgctggcaaccgatctcttttccacgctacagcgtattgttaacccggaagtgactgataaaaaccatgatgaaagcagtaattccgctccctgaataaggaagtgactgataaaaaccatgatgaatcgagtaattccgctccctgatgagcaggcaacattagacctgggcgagcgggtagcgaaagcctgcgatggcgcaaccgtaatctatctgtatggcgatttaggcgcaggtaaaaccacctttagccggggctttttacaggctctgggtcatcagggtaatgtcaaaagccccacttatacgctggtcgaaccctatacgctcgacaacttaatggtctatcactttgatttgtaccgccttgccgatcccgaggagctggagtttatggggatccgcgattattttgccaacgatgccatctgcctggtggagtggccacaacaaggtacaggtgttcttcctgacccggatgtcgaaatacacattgattatcaggcacaaggccgtgaggcgcgcgtgagtgcggtttcctctgcgggtgaattgttgctggcgcgtttagccggttaacctttgaaaggtggcgggatgatgtatcgcatcagaaattggttggtagcgacgctgctgctgctgtgcacgccggtgggtgccgcgacgctctctgatattcaggtttctaacggtaatcaacaggcgcggataacgttgagttttattggcgatcctgattatgcgtttagccatcaaagcaaacgcaccgtggcgctcgatatcaaacaaacgggcgtgattcagggactgccgttgttgttcagcggcaataatctggtgaaggcgattcgctctggaacgcctaaagatgcacaaacgctacggctggtggtcgatcttaccgaaaacggtaaaaccgaagcggtgaagcggcagaatggcagcaattacactgtcgtctttacgattaacgccgatgtgccgccaccgcctcctccgccgcccgtggttgcgaaacgcgttgaaacgcctgcggttgtcgcaccgcgcgtcagcgaaccggcgcgcaatccgtttaaaacggaaagtaaccgcactacgggtgttatcagcagtaatacggtaacgcgtccggcagcgcgcgcgacggctaacactggcgataaaattatcatcgctattgatgccggacacggcggtcaggaccctggcgctatcggccccggtggtacgcgggagaaaaatgtcaccatcgccatcgcgcgtaaattgcgtactttgctcaatgacgatccgatgtttaaaggcgttttaacccgtgacggggattactttatcagcgtgatggggcgcagtgatgtggcacgtaagcaaaacgccaatttcctcgtgagcattcacgctgatgccgcaccgaaccgcagtgcgactggcgcttccgtatgggtgctctctaaccgtcgcgccaacagtgaaatggccagctggctggagcagcacgagaaacagagcgagctgctgggtggggcgggtgatgtgctggcgaacagtcagtctgacccctatttaagccaggcggtgctggatttacagttcggtcattcccagcgggtagggtatgatgtagcgaccagtatgatcagtcagttgcaacgcattggcgaaatacataaacgtcgaccagaacacgccagccttggcgttctgcgcagcccggatatcccaagtgtactggtcgaaaccggttttatcagcaacaacagcgaagaacgtttgctggcgagcgacgattaccaacaacagctggcagaagccatttacaaaggcctgcgcaattacttccttgcgcatccgatgcaatctgcgccgcagggtgcaacggcacaaactgccagtacggtgacgacgccagatcgcacgctgccaaactaaggacgattgatgccaattcaggtcttaccgccacaactggcgaaccagattgccgcaggtgaggtggtcgagcgacctgcgagcgtagtcaaagaactagtggaaaacagcctcgatgcaggtgcgacgcgtatcgatattgatatcgaacgcggtggggcgaaacttatccgcattcgtgataacggctgcggtatcaaaaaagatgagctggcgctggcgctggctcgtcatgccaccagtaaaatcgcctctctggacgatctcgaagccattatcagcctgggctttcgcggtgaggcgctggcgagtatcagtagcgtttcccgcctgacgctcactagtcgcaccgcagaacagcaggaagcctggcaggcctatgccgaagggcgcgatatgaacgtgacggtaaaaccggcggcgcatcctgtggggacgacgctggaggtgctggatctgttctacaacaccccggcgcggcgcaaattcctgcgcaccgagaaaaccgaatttaaccacattgatgagatcatccgccgcattgcgctggcgcgtttcgacgtcacgatcaacctgagccataacggtaaaattgtgcgtcagtaccgcgcagtgccggaaggcgggcaaaaagaacggcgcttaggcgcgatttgcggcaccgcttttcttgaacaagcgctggcgattgaatggcaacacggcgatctcacgctacgcggctgggtggccgatccaaatcacaccacgcccgcactggcagaaattcagtattgctacgtgaacggtcgcatgatgcgcgatcgcctgatcaatcacgcgatccgccaggcctgcgaagacaaactgggggccgatcagcaaccggcatttgtgttgtatctggagatcgacccacatcaggtggacgtcaacgtgcaccccgccaaacacgaagtgcgtttccatcagagccgtctggtgcatgattttatctatcagggcgtgctgagcgtgctacaacagcaactggaaacgccgctaccgctggacgatgaaccccaacctgcaccgcgttccattccggaaaaccgcgtggcggcggggcgcaatcactttgcagaaccggcagctcgtgagccggtagctccgcgctacactcctgcgccagcaagtggcagtcgtccggctgccccctggccgaatgcgcagccaggctaccagaaacagcaaggtgaagtgtatcgccagcttttgcaaacgcccgcgccgatgcaaaaattaaaagcgccggaaccgcaggaacctgcacttgcggcgaacagtcagagttttggtcgggtactgactatcgtccattccgactgtgcgttgctggagcgcgacggcaacattagtcttttatccttgccagtggcagaacgttggctgcgtcaggcacaattgacgccgggtgaagcgcccgtttgcgcccagccgctgctgattccgttgcggctaaaagtttctgccgaagaaaaaagcgcattagaaaaagcgcagtctgccctggcggaattgggtattgatttccagagtgatgcacagcatgtgaccatcagggcagtgcctttacccttacgccaacaaaatttacaaatcttgattcctgaactgataggctacctggcgaagcagtccgtattcgaacctggcaatattgcgcagtggattgcacgaaatctgatgagcgaacatgcgcagtggagtatggcacaggccataaccctgctggcggacgtggaacggttatgtccgcaacttgtgaaaacgccgccgggtggtctgttacaatctgttgatttacatccggcgataaaagccctgaaagatgagtgatatcagtaaggcgagcctgcctaaggcgatttttttgatggggccgacggcctccggtaaaacggcgttagccattgagctgcgtaaaattttaccagtagagttgataagcgttgattctgcccttatttacaaagggatggatatcgggacggcgaagccgaacgctgaagagttactcgccgcgccgcaccgattgctggatattcgcgatccgagccaggcttacagcgctgctgattttcgccgcgatgcgctggcggaaatggccgatatcaccgcggcggggcggatcccactgttagtgggcggtacgatgttgtatttcaaggcattgctggaagggttgagcccgctaccgagcgcagacccggaagtacgggccagaattgagcaacaggcggcagagcaaggttgggagagtttgcatcgtcaacttcaggaggtagatccggttgcggcagcaaggattcatccaaatgatccacaaaggctttcccgggcactggaagtttttttcattagcggtaaaactttaacggaactgacgcaaacgagtggagacgctctaccgtatcaggtgcatcagttcgccatcgccccggcgagccgtgaactgctccatcaacgcattgagcagcgttttcatcagatgttggctagtggttttgaagcagaagtccgggcgctttttgcccgaggagatttgcatacggacttgccttccattcgttgcgtgggttatcgccagatgtggtcttaccttgaaggcgaaatcagttacgatgaaatggtttatcgaggtgtttgcgccacgagacagttggcgaagcggcagataacctggctgcgtggttgggaaggggttcactggcttgacagtgaaaaaccagaacaggcgcgtgacgaagtattacaggttgttggtgctatcgcaggctgaatgtgtacaattgagacgtatcgtgcgcaattttttcagaatcgaaaggttcaaagtacaaataagcatataaggaaaagagagaatggctaaggggcaatctttacaagatccgttcctgaacgcactgcgtcgggaacgtgttccagtttctatttatttggtgaatggtattaagctgcaagggcaaatcgagtcttttgatcagttcgtgatcctgttgaaaaacacggtcagccagatggtttacaagcacgcgatttctactgttgtcccgtctcgcccggtttctcatcacagtaacaacgccggtggcggtaccagcagtaactaccatcatggtagcagcgcgcagaatacttccgcgcaacaggacagcgaagaaaccgaataaggtttcgggctgtttttttacacggggagccagcgatcctgcgttccccgctgatctatttagagggttatacgcttgtttgaccgttatgatgctggtgagcaggcggtactggtacacatctattttacgcaagacaaagatatggaagacctccaggagtttgaatctctggtctcttccgccggtgtcgaagcattgcaggtgattaccggtagccgtaaagcgccgcacccaaagtattttgtaggtgaaggtaaagcagttgaaattgcggaagctgtcaaagcgacgggtgctagcgtcgttctttttgaccatgccctgagcccggcgcaagagcgtaacctggagcgtttgtgcgagtgtcgtgttatcgaccgcaccggccttattttagatattttcgcccaacgtgcgcgtacccatgagggtaagttgcaggttgagctggcgcagctgcgccatctggctacgcgcctggtgcgtggctggacccaccttgaaagacagaaaggcgggataggtttgcgtggtccgggtgaaacccagctcgaaaccgaccgtcgtttgttgcgtaatcgcatcgtgcagatacagagccgcctggaaagagttgaaaagcagcgtgagcaggggcggcaaagccgtatcaaagccgacgttcctactgttagcctggtgggatataccaacgccggtaaatctacccttttcaatcgcatcaccgaagcgcgggtctacgcggcagaccagttgtttgccaccctcgacccgacgttgcggcgtattgacgttgcagatgtcggtgaaaccgtacttgcagataccgtagggtttattcgccacctgccgcacgatctggtggcggcatttaaagccacgttacaagagacgcggcaagccacattactgctgcacgtcattgatgcggcggatgtgcgtgtacaagaaaacatcgaagcggtgaatacggttcttgaagagatcgacgctcacgagatcccaaccctgctggtgatgaacaagatcgatatgctggaagatttcgaaccgcgtattgatcgggacgaagagaacaaaccgaaccgtgtctggctttccgcacagaccggagcggggataccacagctttttcaggctttgacggagcggctttccggcgaggtggcgcagcatacattgcgtctgccaccgcaggaagggcgtctgagaagtcgtttttatcagcttcaggcaatagaaaaagagtggatggaggaggacggcagcgtaagtctgcaagttcgtatgccgatcgttgactggcgtcgcctctgtaaacaagaaccggcgttgatcgattacctgatctaacggcgtagcgtctgaagcgtggagtcatatcctctggcgtcgaaagacaacagggatcaccgcataacaaatatggagcacaaacatggcgtggaatcagcccggtaataacggacaagaccgcgacccgtggggaagcagcaaacctggcggcaactctgagggaaatggaaacaaaggcggtcgcgatcaagggccacctgatttagatgatatcttccgcaaactgagcaaaaagctcggtggtctgggcggcggtaaaggcaccggatctggcggtggcagtagtagccaaggcccgcgcccgcagcttggcggtcgtgtcgttaccatcgcagcggcagcgattgtcattatctgggcggccagtggtttctataccattaaagaagccgaacgcggcgtggtaacacgctttggtaaattcagccatctggttgagccgggtctgaactggaaaccgacgtttatcgacgaagtcaaaccggtgaacgtggaagccgtgcgtgaactggccgcttctggtgtgatgctgacgagcgacgagaacgtagtgcgcgttgagatgaacgtgcagtaccgcgtcaccaatccggaaaaatatctgtatagcgtgaccagcccggatgacagcctgcgtcaggctaccgacagcgccctgcgtggagttatcggtaaatacaccatggaccgcattctgacggaaggtcgtaccgtgattcgtagcgatactcagcgcgaactggaagagacgattcgtccgtatgacatgggtatcacgctgctggacgtcaacttccaggctgctcgtccgccggaagaagtaaaagcggcgtttgacgatgcgattgccgcgcgtgaaaacgaacagcaatacattcgtgaagcagaagcgtataccaacgaagttcagccgcgtgcgaacggtcaggcgcaacgtatcctcgaagaggcgcgtgcgtacaaggcccagaccatcctggaagctcagggtgaagtggcgcgctttgctaaacttctgccggaatataaagccgcgccggaaattactcgcgagcgtctgtatatcgagacgatggaaaaagtgttgggtaacacccgcaaagtgctggttaacgataaaggtggcaacctgatggttctgccgttagaccagatgctgaaaggtggtaacgcccctgcggcgaagagcgataacggtgccagcaatctgctgcgtctgccgccagcctcttcctccacaaccagtggagcaagcaacacgagctccaccagtcagggcgatattatggaccaacgccgcgccaacgcgcagcgtaacgactaccagcgtcagggggaataacgatgcgtaagagtgttatcgcgattatcatcatcgtgctggtagtgctttacatgtctgtctttgtcgtcaaagaaggtgagcgcggtattacgctgcgttttggtaaggtactgcgtgacgatgacaacaaacctctggtttatgagccgggtctgcatttcaagataccgttcattgaaacggtgaaaatgctcgacgcacgtattcagaccatggacaaccaggccgaccgctttgtgaccaaagagaagaaagacctgatcgtcgactcttacatcaaatggcgcatcagcgatttcagccgttactacctggcaacgggtggtggcgacattagccaagcggaagtgctgttgaaacgtaagttctctgaccgtctgcgttctgaaattggtcgcctggacgtgaaagatatcgtcaccgattcccgtggtcgtctgaccctcgaagtacgtgacgcgctgaactccggttctgcgggtacagaagatgaagttactaccccggcggcagataacgccattgccgaagcggcagagcgcgtaacggctgagacgaagggcaaagttccggtcatcaacccgaacagtatggcggcgctgggtattgaagttgtcgatgtgcgtatcaagcagatcaacctgccgaccgaagtgtctgaagcgatctacaaccgtatgcgcgccgagcgtgaagcggtagcgcgtcgtcaccgtagtcaaggtcaggaagaagcggaaaaactgcgcgcgactgccgactatgaagtgaccagaacgctggcagaagctgagcgtcagggccgcatcatgcgtggtgaaggcgatgccgaagcagccaaactgtttgctgatgcattcagtaaagatccggacttctacgcattcatccgtagcctgcgtgcttatgagaacagcttctctggcaatcaggacgtgatggtcatgagcccggatagcgatttcttccgctacatgaagacgccgacttccgcaacgcgttaatataacgactgcggtacaggtcaataaagccaccgcatcctcagggatgtcggtggttttctttttctataaggataatgaatgaatagcacaatctggctggcgcttgccctggttttggtactggaaggtttagggccgatgctttacccgaaggcatggaagaagatgatctctgcgatgaccaatttgcccgataatattttacgtcgttttggcggtggacttgtggttgcgggcgttgtggtctactacatgttgaggaaaacgattggctgaacaaaaaacagactgatcgaggtcatttttgagtgcaaaaagtgctgtaactctgaaaaagcgatggtagaatccatttttaagcaaacggtgattttgaaaaatgggtaacaacgtcgtcgtactgggcacccaatggggtgacgaaggtaaaggtaagatcgtcgatcttctgactgaacgggctaaatatgttgtacgctaccagggcggtcacaacgcaggccatactctcgtaatcaacggtgaaaaaaccgttctccatcttattccaagtggtattctccgcgagaatgtaaccagcatcatcggtaacggtgttgtgctgtctccggccgcgctgatgaaagagatgaaagaactggaagaccgtggcatccccgttcgtgagcgtctgctgctgtctgaagcatgtccgctgatccttgattatcacgttgcgctggataacgcgcgtgagaaagcgcgtggcgcgaaagcgatcggcaccaccggtcgtggtatcgggcctgcttatgaagataaagtagcacgtcgcggtctgcgtgttggcgaccttttcgacaaagaaaccttcgctgaaaaactgaaagaagtgatggaatatcacaacttccagttggttaactactacaaagctgaagcggttgattaccagaaagttctggatgatacgatggctgttgccgacatcctgacttctatggtggttgacgtttctgacctgctcgaccaggcgcgtcagcgtggcgatttcgtcatgtttgaaggtgcgcagggtacgctgctggatatcgaccacggtacttatccgtacgtaacttcttccaacaccactgctggtggcgtggcgaccggttccggcctgggcccgcgttatgttgattacgttctgggtatcctcaaagcttactccactcgtgtaggtgcaggtccgttcccgaccgaactgtttgatgaaactggcgagttcctctgcaagcagggtaacgaattcggcgcaactacggggcgtcgtcgtcgtaccggctggctggacaccgttgccgttcgtcgtgcggtacagctgaactccctgtctggcttctgcctgactaaactggacgttctggatggcctgaaagaggttaaactctgcgtggcttaccgtatgccggatggtcgcgaagtgactaccactccgctggcagctgacgactggaaaggtgtagagccgatttacgaaaccatgccgggctggtctgaatccaccttcggcgtgaaagatcgtagcggcctgccgcaggcggcgctgaactatatcaagcgtattgaagagctgactggtgtgccgatcgatatcatctctaccggtccggatcgtactgaaaccatgattctgcgcgacccgttcgacgcgtaattctggtacgcctggcagatattttgcctgccgggcgaacagtgtgatacattgctgtgtcgggtaagccattacgctatccgacacagtgttaaatcctcgcttttttccttccccgaactgaaataaattagcgacacagcttgtggctggtttatcatcaatataaatgtattttttcccgatttcccttttgaggttgatgtgcagttaacgagtttcactgattacggattacgtgcgctgatctacatggcgagtttgccagaagggcggatgaccagtatttctgaagtgactgacgtctacggcgtctcccgtaatcatatggtcaaaataatcaatcaacttagtcgtgccggctacgtgactgctgttcgtggaaaaaatggcggcattcgcctgggtaaaccggcgagtgcgatacgtattggtgatgtggtgcgcgagctggagcccttaagcctggtgaattgcagcagtgagttttgccacattacacctgcctgtaggttgaaacaggcactttctaaggccgtgcaaagttttcttacggaactggataactacacgcttgccgatttggttgaagagaatcaaccgctttataaattattgctggtggagtgacgaaaatcttcatcagagatgacaacggaggaaccgagatgagtcaagatcctttccaggaacgcgaagctgaaaaatacgcgaatcccatccctagtcgggaatttatcctcgaacatttaaccaaacgtgaaaaaccggccagccgtgatgagctggcggtagaactgcacattgaaggcgaagagcagcttgaaggcctgcgtcgccgcctgcgcgcgatggagcgcgatggtcaactggtcttcactcgtcgtcagtgctatgcgctgccggaacgcctcgacctggtgaaaggtaccgttattggccaccgtgatggctacggctttctgcgggttgaagggcgtaaagatgatttgtatctctccagcgagcagatgaaaacctgcattcatggcgatcaggtgctggctcagccgctgggtgctgaccgtaaaggtcgtcgtgaagcgcgtattgtccgcgtactggtgccaaaaaccagccagattgttggtcgctactttaccgaagcgggcgtcggctttgtggttcctgacgacagccgtctgagcttcgatatcttaatcccgcccgatcagatcatgggcgcgcggatgggctttgtggtcgtagtcgaactgactcagcgtccgactcgccgcaccaaagcggtgggtaaaatcgtcgaagtgctgggcgacaatatgggcaccggcatggcggttgatatcgctctgcgtacccatgaaattccgtacatctggccgcaggctgttgagcaacaggttgccgggctgaaagaagaagtgccggaagaagcaaaagcgggccgtgttgatctgcgcgatttaccgctggtcaccattgatggcgaagacgcccgtgactttgacgatgcagtttactgcgagaaaaaacgcggcggcggctggcgtttatgggtcgcgattgccgacgtcagctactatgtgcgtccgagtacgccgctggacagagaagcgcgtaaccgtggcacgagcgtgtacttccctagccaggttatcccgatgctgccggaagtgctctctaacggcctgtgtagcctcaacccgcaggtagaccgcctgtgtatggtgtgcgagatgacggttagcagcaaaggccgcctgacgggctacaaattctacgaagcggtgatgagctctcacgcgcgtctgacctacaccaaagtctggcatattctgcagggcgatcaggatctgcgcgagcagtacgccccgctggttaagcatctcgaagagttgcataacctctataaagtgctggataaagcccgtgaagaacgcggtgggatcagttttgagagcgaagaagcgaagttcattttcaacgctgaacgccgtattgaacgtatcgaacagacccagcgtaacgacgcgcacaaattaattgaagagtgcatgattctggcgaatatcagcgcggcgcgtttcgttgagaaagcgaaagaaccggcactgttccgtattcacgacaagccgagcaccgaagcgattacctctttccgtagtgtgctggcggagctggggctggaactgccgggcggtaacaagccggaaccgcgtgactacgcggagctgctggagagcgttgccgatcgtcctgatgcagaaatgctgcaaaccatgctgctgcgcagcatgaaacaggcgatttacgatccagaaaaccgtggtcactttggcctggcattgcagtcctatgcgcactttactagcccgattcgtcgttatccagacctgacgctgcaccgcgccattaaatatctgctggcgaaagagcaggggcatcagggcaacaccactgaaaccggcggctaccattatagcatggaagagatgctgcaactgggtcagcactgtagcatggcggaacgtcgtgccgacgaagcaacgcgcgatgtggctgactggctgaagtgtgacttcatgctcgaccaggtaggtaacgtctttaaaggcgtaatttccagcgtcactggctttggcttcttcgtccgtctggacgacttgttcattgatggtctggtccatgtctctagcctggacaatgactactatcgctttgaccaggtagggcaacgcctgatgggggaatccagcggccagacttatcgcctgggcgatcgcgtggaagttcgcgtcgaagcggttaatatggacgagcgcaaaatcgactttagcctgatctccagcgaacgcgcaccgcgcaacgtcggtaaaacggcgcgcgagaaagcgaaaaaaggcgatgcaggtaaaaaaggcggcaagcgtcgtcaggtcggtaaaaaggtaaactttgagccagacagcgccttccgcggtgagaaaaaaacgaagccgaaagcggcgaagaaagacgcgagaaaagcgaaaaagccaagcgcgaaaacgcagaaaatagctgcagcgaccaaagcgaagcgtgcggcgaagaaaaaagtggcagagtgatcaataccctctttaaaagaagagggttagattgctgacaaaatgcgctttgttcatgccggatgcggcgtgaacgccttatccggcctacataatcacgcaaattcaatatattgcagagatcatgtaggccggataaacgtagtgcatcaggcaaaacgtaaacaacgagtacattaatgagcgaaatgatttacggcatccacgcagtgcaggccctgctggagcgcgcccctgaacgttttcaggaagtctttattttaaaaggccgtgaagataaacgtctgttaccgctgattcacgcccttgagtctcagggcgtggttatccagttggcaaaccgccaatatctcgacgagaaaagcgacggtgccgtgcatcagggcattatcgcccgcgtgaagccaggacgtcagtatcaggaaaacgatctgccggatctgatcgctagcctcgatcaaccgttcctgctgatcctcgacggcgtaaccgatccgcacaacctcggcgcgtgcctgcgtagtgcggacgccgcaggcgttcatgcggtgattgtgccgaaagatcgctccgcacagctcaacgctacggcgaaaaaagtagcctgcggcgcggcagaaagcgttccgctgattcgggtgactaaccttgcgcgcaccatgcgtatgttgcaggaagagaatatctggatcgtcggtacggcaggcgaggcggatcatacactctatcagagcaaaatgaccggacgcctggcgctggtgatgggtgcggaaggtgaaggtatgcgtcgcctgactcgtgaacattgcgatgagttgatcagcatcccgatggctggaagcgtttcttccctgaacgttagcgttgcgaccggaatttgcttatttgaagcggtgcgccagcgcagctaatttctcagaattatgaaaagccatccagatttggatggtttttttttgtctatagctggtaagataattacgtattgcaaatattcattttattaatatttaaacttaatctatatggaataatatatgacatggaatccgttggcgctagcgacggcgctgcaaactgtacctgaacaaaatattgatgtaacaaatagcgagaacgcattaattattaaaatgaatgattatggcgatttgcaaatcaatattctttttacttcccgccaaatgattatcgaaacctttatttgtccggtgagtagtatcagcaatccagatgaatttaataccttcttattaagaaatcagaagatgatgccgttgagtagcgtagggatctccagcgtacaacaggaagagtattacattgttttcggggcgttaagccttaaatcttctcttgaagatatcctgcttgagataaccagcctggtagataacgcattggatctggctgaaattacagaagaatatagtcactaattacaaggacgggtatttatgggaattttaaaaagtttatttacgctggggaaaagctttatctcccaggcggaagaatccattgaagaaacccagggcgtgcgcatgctggaacagcatattcgtgacgctaaagctgaactcgataaagccggaaaatctcgcgttgatctgctggcgcgggtgaaattaagtcacgataagctgaaagatttacgtgagcgcaaagccagtctggaagcccgtgcgctggaagcgttaagcaagaacgttaatccgagcttgattaacgaagttgctgaagaaatcgcgcgccttgagaatctcattaccgctgaagagcaagtgttgagcaatctggaagtctcccgtgatggcgtggaaaaagcagttacagcgacagcgcagcgtatcgctcagtttgagcagcaaatggaagtcgttaaagccactgaagccatgcagcgtgcacaacaggctgtaacaacctctaccgttggcgcatcttccagcgttagcacagcggcagaatccttaaaacgcctgcaaacgcgtcaggccgaacgtcaggctcgcctggatgctgccgcacagttggagaaagtcgcagacggtcgcgaccttgacgaaaagctggcggaagccggaattggcggtagcaataaaagtagcgcccaggatgtattagcaagactgcaacgccaacagggcgagtaatttttttgccagcctcgctaaaaggctggcaactattttaaggataaaatatgtctggttttttccagcgtctgtttggcaaggataataagccagctatcgctcgtggtccgctgggacttcatctcaatagtggctttacgctcgacacgttagcgtttcgtttgctggaagatgaattgctgattgcgctgccgggtgaggaatttacggtagccgccgtcagccacatcgatctgggcggcggtagtcagattttccgctactacactagtggcgatgagtttctgcaaatcaataccaccggcggcgaagatattgatgacattgatgatatcaagctctttgtctatgaagagagctacggtatcagtaaagagagtcactggcgcgaggcgatcaacgccaaagcgatgggagcaatgaccttaaactggcaggaaaaacgctggcagcgattttttaacagcgaagaaccgggaaatatcgaacccgtctacatgctggaaaaagtagaaaatcaaaaccatgccaaatgggaggtccataattttaccatgggctaccaacggcaagtaaccgaagatacttacgaatatttgctgctaaatggtgaggaatcttttaacgatctcggcgagccagagtggttatttagccgcgcgttgggtgtcgatatcccgctgacaagtcttcatattattggttaattacaaggacgtttacaatgcatatactggatagtcttcttgcctttagcgcctatttttttattggcgtggctatggtgattatttttctgtttatctattctaaaattacaccgcacaacgaatggcagttaatcaaaaacaataataccgcggcgagtctggcgttcagcggtacattgttgggttacgttatccccttatccagtgcggcaatcaatgcggtgagtattccagactatttcgcctggggcgggattgcactggtgattcagttactcgtttttgctggtgtcagactttatatgcccgcattaagcgaaaaaattattaatcacaataccgcagcaggaatgtttatgggaaccgccgcgctggctggcggtatttttaacgcagcttgtatgacatggtaatggacgatcatggccagaaaacgcaaaagtagaaataacagtaaaattggtcacggagcgattagtcgcattggtagaccgaataatccttttgaaccgtgccgcaatcgctacgcacaaaaatacttaacgttggcgctaatgggcggtgccgcttttttcgtattgaaaggttgtagcgatagtagcgatgtcgataacgacggcgacggaacgttttacgcgacagtgcaggattgtattgatgacggtaataatgccgacatttgcgcgcgtggctggaacaacgccaaaacggcattttatgccgatgttccgaagaatatgactcagcagaactgtcagtctaagtacgaaaattgctactacgacaatgttgaacagagttggatcccggtcgtttctggatttttgttaagccgggttattcgtaaagatcgcgatgagccgtttgtttataacagcggcggttcctcttttgctagccgcccagtctggcgcagcacttctggtgattactcctggcgctccggttctggcaaaaaagagtcttactctagcggcggctttaccaccaaaaaagcgtctaccgtttctcgcggcggctatggtcgttcttccagcgcccgtgggcattggggaggctaatcatgctgagacacaacgttcctgtgcgacgggatctggaccagatcgccgctgacaacggtttcgactttcatatcatcgacaatgaaatctattgggatgagagtcgggcttaccgttttactctgcgccagattgaagagcagatcgaaaaaccgactgcggaactgcatcagatgtgccttgaggtggtggatcgcgcggtaaaagatgaagagatcctgacgcaactggcgatcccgccgttgtactgggatgtgatcgctgaaagctggcgcgcccgcgatcctagcctgtatggacggatggattttgcctggtgtggcaatgcgccggtgaagctgctggagtacaacgccgatacgccaactagtttgtacgagagcgcttattcccagtggctgtggctggaggatgcccggcgcagcggcattattccgcgtgatgccgatcagtacaatgctattcaggaacgcctgattagtcgctttagcgagctttacagtcgggaaccgttttatttttgctgctgtcaggacaccgatgaagacaggagtaccgtgctgtacttgcaggactgcgcccagcaggcagggcaggagagccggtttatctacattgaagatctcggtttgggcgtcggcggcgtactgaccgatcttgatgataatgtcatccagcgtgcatttaagctgtatccgctggagtggatgatgcgtgacgataacggtccgctgctgcgcaagcgtcgcgagcaatgggtggagccgttatggaaaagtatcttgagtaataaagggctaatgccgctgctttggcgcttcttccctggtcatcctaatcttcttgcgtcctggttcgatggcgagaaaccgcagattgccgctggcgaaagctatgtgcgtaaaccaatctatagccgcgaaggcggcaacgtcaccatttttgacggcaagaataacgttgttgaccacgctgatggtgattacgccgatgaaccgatgatctaccaggcgtttcaacctctgccgcggtttggcgatagctacacactcatcggtagctggattgtcgatgatgaagcgtgcggaatggggatccgtgaagataacacactgatcaccaaagacaccagtcgtttcgttccgcattacattgctggataagaatgttttagcaatctctttctgtcatgaatccatggcagtgaccatactaatggtgactgccattgatggagggagacacagtgcactggcaaactcacaccgtttttaatcaacctataccattaaataacagcaacttatacctgtctgatggcgcgctctgcgaagcggtaacgcgtgaaggtgctggctgggatagcgattttctagccagtattggtcagcagttaggaacggctgaatcccttgaactggggcggctggcgaatgtgaatccgcctgaattattgcgctacgatgcgcaaggacgccgtctggacgatgtgcgttttcaccccgcctggcacctgctgatgcaggcgctatgtaccaatcgggtgcacaatcttgcctgggaagaagacgctcgctccggcgcatttgtggcgcgcgcggcgcgttttatgttacatgcgcaggttgaggcagggagcttatgtccgataaccatgacctttgccgccacgccattgttgttacagatgttacccgcgccgtttcaggactggaccacgccgctattgagcgatcgctacgattctcacttattgccaggtgggcaaaaacgcggtttgttgattggcatgggaatgacggaaaagcagggcggttccgatgttatgagcaacaccacccgtgcagagcgtctggaagatggctcttatcggctggtggggcataaatggtttttcagcgttccgcaaagcgatgcgcatctggtgctggcgcagaccgcgggtggtctgtcctgcttttttgtgccgcgctttttgcctgacgggcaacgcaacgcgattcgcctcgagcggctgaaagataagctgggtaatcgctctaacgccagttgcgaagtggagtttcaggatgccattggttggttgttggggctggaaggggaaggaattcgtctgatcctgaaaatgggtgggatgacgcgttttgattgcgccctgggtagccatgccatgatgcgccgtgcatttagcctggcgatttatcatgcacatcaacgccatgtttttggtaatccattgatccaacagccccttatgcgtcatgtcttaagtcgcatggcacttcagcttgaagggcaaacggcgttgctgtttcgtcttgcgcgagcgtgggaccggcgtgccgatgccaaagaagccctgtgggcgcgtttatttacgcctgcggcaaaatttgtgatctgcaaaagaggtatgccgtttgtggccgaagcgatggaggtgctgggcggcattggttattgcgaggagagtgagctgccgcggctttaccgggagatgccggtaaacagtatttgggaaggttccggcaatattatgtgcctggatgtgttgcgcgttctcaataagcaagcgggcgtatacgacttattgagcgaagcatttgtggaagtgaaagggcaggatcgctattttgatcgcgcggttcgtcgtttacagcagcagctgcgtaagccagctgaagaactggggcgagagattactcatcagctattcctgctgggctgcggtgcgcaaatgttgaaatatgcttctccgccaatggcgcaggcgtggtgtcaggtgatgttagatacgcgcggcggcgtacggttgagtgagcagatccagaatgatttattgctgcgggcgacggggggagtgtgtgtgtaagcgtatacgactgatgcgacgctggtttcgattaactaaatgaaatatgtgaaaattgtaggccggacaaggcgctcgcgccgcatccggcattgttcatttgctgtagatgacactcatgcatacagtatcgcctgtacgcgccagttatcaggctgctggtcttcgtacatggtaataatgcggtaccaactcgcaccttgttcatcggcctttaacgccacgatacgttccacgtcctgcggatccccactaatattgctaacactgatctgacctatttcattcaggcccgtcacgcagtcagcactggcgaattctgcagactgtgccgtggcgctcgcaggataagtcactaattgcaggctgggactggcaagtaattgtttcatcgtcagctccatttttcgtttccccacatgttgcagggcattccatcgcggtaataaacgcccaggcttccagccggtaatttattgtgcacaggtaaacgcatagggacgcaaagcaatgtaaagctgactatgtaagttgtctgatttatttacggtacaaaatggcttgactataccactgtcctgtcacgatggtttcgtccaccatgacgacaacgtaataatcagcttttgcagcgacagctttcgctttgatttctgctaatgcgtcatccggagaaccccgaaccatcgtgcttacgctacctattcgctgtaacccttgcgtctggtcgcggcgaatctcttgcggatggtccgttactggcggtgctggctgtggcgtaccttgcagtgcgctacaggcacttaacatcaacaccaataataaactggcaaaccggtaaataacgctattacgtttcctgctaaccatagtgtagtgccttattaatttaactttgggggaatgttcccgaattgttacctggtacgcgattttcgaatgaaaacgtgacgaaagcgtaacccacatctcaacattatgaactaataccgccagcagaaacttgtgctaaggatttcttcatgtcataccagacaaaaaggagagacagatgattgaaatagaaagtcgcgagctggcagatattcccgttcttcatgcttatcctgtcgggcaaaaagataccccgttaccgtgcgtaattttttatcacggctttactagttccagtctggtgtatagctattttgccgttgcgctggcgcaggctggtttgcgggtgatcatgccggatgcgcccgatcacggtagccgttttagtggtgacgcagcgcggcggttaaatcaattctggcaaatcttgctacaaagtatgcaggaattcactactttacgtgcggcaatagccgaagaaaactggctgcttgatgaccgtctggcagtcggtggcgcgagcatgggcgcgatgacggcactggggattaccgctcgccaccccacggtgagatgtaccgccagcatgatgggaagcggctattttacaagtctcgcccgtagtctgtttccaccgctgatacctgaaacggcagcacagcagaatgaattcaataacattgtcgcgccactggcagagtgggaagcgacaaaccacctggaacaacttagtgacagacctctactgctgtggcatggcctcgacgatgacgttgtgcctgccgacgaaagtctacgtttgcagcaggccttaagcgagacgggacgggataaactgctaacctgtagttggcagccaggcgtgcgtcaccgcattacgcctgaggcgttagatgctgccgtgacatttttccgccagcatctttaaacacgcagaatgctgaccccttgcgcttccagttgttgcaggatttccgggttagcatttttgccggtgataagcatatcgatttgatcggcacggctaaaaagcattcccgcgcgttcgccaatcttactgctatcaaccagtaccaccagtttccctaccacgctcagcatcttctgctctgccattgctgtcagcatatcggttttatacaacccttctgcggtcagcccttttccgctggtaaacatccagtgcccggcatagagactgttttcgctgccctgcgggcttaaagtgatggactgacttttgttgtactgtccgcccataatgatcacgctgtcatgttcttgatcgatcaggtaatttgccagcggtagataattagtgatgatttgcactggcttgccacacatttcccgcccaagcagaaacgcggtggagccgcagttgatgactacgctttcgcccggattaaccagctggctggccgctttagcgatacgtactttttcatcgtgattctgcgcctgatgcagattcatcggcgtccagcgcgggcgctgttgggtaatagcttctgcgccattgcgcacttttttcagtttgccgctttcgtcaagtttattgatatcgcgtcgcgcagtggcagggctaattcccagacgctcaacgactttctcaacggtcacaaagcccaattgtgcgagcatttccaggaggatttgatgtctttgtgcttcagtcatgagctattccgataaaatttgatttttttagatgatatttgaaatagccaggaaatactacgccggatagcgcgaacttctccacgctacccggtataaacgacagattacaggaaactcttgaacggcagatccggttcaatagtgaagcaatcatcgaaaccgcgcggatagtggtactcgaagttgtctttatccagcggccaggtaaatttgccacccacctgccagataaacggcttgaagccatacttcaggcgatcttttttcatctcccacagcacgcggatctcttgcggatcggcctggaagttactccagatatcgtggtggaacgggatcactactttcgcattcagcgcttcacccatacgcagcatatcggcgctggtcattttgtcggtgataccgcgcgggttttcgccgtagcttcctaacgccacgtcgatctgatgttcgttaccgtgcttcgcataatagttagagtagtgggagtcgccgctgtgatacagggagccgccaggcgttttgaacaggtagttcaccgcgcgatcgtccatgccatctggcagtacgccagccgctttttgatcggcaggcagggtgatcagtgcagtacggtcgaaagcatcaagcgcatgaatttcaatgtctttcacttttactacatcgcccggtttgaccacgatgcaacgctctttcggtacgccccagccaatccacaaatccacacaggttttcggtccgataaacggtacgtcatctgcacaattctgcatcacggcagcagcgacgttaacgtcgatatgatcgttgtgatcgtgagtcgccagtaccgcgtcgatctggcgaatcgcaaacggatcaagaacaaacggggtggtacgcaggtttggctgcagttttttcacgccagccatgcgctgcatctggtgaccctgtttcattaacgggttaccgtgactttgtttgccagtgccgcaccagaaatcaacgcaaacgttggtgccaccttcgcttttcaaccagatcccggtgcagccaagccaccacatcgcaaatgtgccaggagcgacctgttcttgttcaatttcttcattcaaccagctaccccactccgggaaagtgctcaggatccaggattcacgggtgatacttttcactttactcatcgccatttaccttcatgatagttcaattcgaatcaatatgtgattggttttgattaatcctgacactattttttcaggaaggcaatgaccattttttgactttttgccagggaagttgttgttgattttgagtatggaaagatttaatggaatgtgtaattcaattaactaaatgaatttaaatggataattgtttcgttgtgtgaatcccactctatccatgtggaattatttgcgggtcgcgtcacatttaatcataaataatcttgttgtgattacttttgaaaattagagtgagtgcacaacattccgggtgtgtggaatacccggttacctcttcttcaggagatcgttatggagatcctctacaacatctttaccgtgttttttaaccaggtcatgaccaatgccccgttgttgctgggtattgtgacctgtctgggctacatcctactgcgcaaaagtgtcagcgttattattaaaggcacgattaaaaccataattggtttcatgttgttgcaggcagggtccggcatcctcaccagcaccttcaaaccggtggtggcgaaaatgtccgaagtctacggcattaacggcgcaatttccgatacctacgctagtatgatggcaaccatcgaccgcatgggcgatgcctatagctgggtgggttacgccgtattgttagcgctggcgctgaacatctgttacgtgctgttgcgtcgcattaccggcattcgcacaatcatgttgaccggccacatcatgttccagcaggccgggttgattgccgttacgctgtttatcttcggctactccatgtggaccaccattatctgtaccgcgattctggttagcctctactggggcatcacttccaacatgatgtacaagccgactcaggaagtgacggatggctgtggtttctccatcggtcaccagcagcagtttgcaagttggattgcctataaagtcgcgccgttcctcggcaaaaaagaggagagcgttgaagacctcaaattgccgggctggctgaacattttccacgacaacatcgtctccacggcgattgtgatgaccatcttctttggtgccattctgctctccttcggtatcgacaccgtgcaggcgatggcaggcaaagtgcactggacggtgtacatcctgcaaactggtttctcctttgcggtggcgatcttcatcatcacgcagggtgtgcgcatgtttgtggcggaactctctgaagcatttaacggcatttcccagcgcctgatcccaggtgcggttctggcgattgactgtgcagctatctatagcttcgcgccgaacgccgtggtctggggctttatgtggggcaccatcggtcagctgattgcggttggcatcctggtcgcctgcggctccagcatcctgattattcctggctttatcccgatgttcttctctaacgccaccatcggcgtgttcgctaaccacttcggcggctggcgtgcggcgctgaagatttgtctggtgatggggatgatcgaaatctttggttgcgtctgggcggtgaaactcaccggtatgagtgcctggatgggcatggcggactggagcattctggcaccgccgatgatgcaaggcttcttctccatcggtatcgcctttatggccgtcatcattgtaattgcactggcttatatgttcttcgctggccgcgcgctgcgcgcagaagaagatgcagaaaaacaactggcagaacagtctgcttaataaggagttttgattatgaccgtacgtattctggttgtgtgtggcaacggacaaggcagttccatgatcatgaagatgaaagtggaccagtttttaacccaaagtaacattgaccatacggtaaacagctgcgcggttggcgagtacaaaagcgagttgagtggcgcggatatcatcatcgcttctacgcacattgcgggcgaaatcaccgtgaccggcaacaaatacgtggttggcgtgcgcaacatgctctctcctgccgactttggcccgaaactgctggaagtgatcaaagagcatttcccgcaggatgtgaagtaaggacgcgccatgaaattacgtgatagcctggcggaaaataaatccatccgcctgcaggctgaagcagagacatggcaggaagcggtgaaaatcggcgttgacctgctggtggcggcagatgtggtagagccgcgttactaccaggcgattctggatggcgttgaacagttcggtccttatttcgttatcgctccgggcctggcaatgccgcacgggcgtccggaagagggcattaagaaaaccggtttctctctggtaacgctgaaaaagccgctggagttcaaccacgatgacaacgatccggtggatatcctcatcaccatggcggcggtcgatgccaatactcaccaggaagtgggcatcatgcagatcgtcaacctgtttgaagatgaagagaattttgaccgtttacgcgcctgccgtaccgagcaggaagtactggatctcattgaccgcaccaacgcggcagcttaagaaggaattgaacatgagtttaccgatgttgcaagtcgcgctggacaaccagactatggatagcgcctacgaaaccactcgcctgattgccgaagaagtcgacattatcgaagtgggcaccattctgtgcgtgggcgaaggcgtgcgtgcggttcgtgacctgaaagcgctctacccgcacaaaatcgtactggcagacgccaaaattgccgatgcaggcaaaatccttagccgtatgtgcttcgaagccaacgctgactgggtgacggtaatttgctgtgcggatatcaacaccgccaaaggcgcgctggacgtggcaaaagagtttaacggcgacgtgcagatcgaactgaccggttactggacctgggaacaggcgcaacagtggcgcgatgcaggcattgggcaggtggtttatcaccgcagccgtgacgcgcaggccgcaggcgtggcgtggggcgaagcggacatcaccgcgatcaaacgtctttccgatatgggcttcaaagtcaccgtcaccggaggcctggcgctggaagatctgccgctgttcaagggtattccgattcacgtctttatcgcgggccgtagtatccgtgatgccgcttctccggtggaagccgcacgtcagttcaaacgttccatcgctgaactgtggggctaaggagcggatatgttgtccaaacaaatcccgcttggcatctatgaaaaagcgctccccgccggggagtgctggctggaacgcctgcaactggcaaaaacgttaggcttcgattttgtcgaaatgagcgtagatgaaactgacgatcgcctgagccgcctcaactggagccgcgagcagcgtctggcgctggtcaatgcgattgttgaaaccggcgtgcgcgtgccgtccatgtgcctttctgctcatcgtcgtttcccgctgggcagtgaagatgacgcggtgcgggcgcaggggctggagattatgcgtaaagctatccagttcgcccaggatgtcggtattcgcgtgatccagctggcgggctatgacgtttactatcaggaagccaataacgaaacgcgtcgtcgtttccgtgacggcctgaaagagagcgttgagatggcaagccgcgcgcaggtgacgctggcgatggagatcatggattatccgttgatgagctccatcagcaaggcgctgggatacgcgcactatctcaacaatccgtggttccagctctacccggatatcggcaacctgagcgcgtgggacaacgatgtgcagatggagttgcaggccggaatcgggcatatcgtcgcggtacatgtgaaagacaccaaacctggcgtcttcaaaaacgtgccgtttggcgaaggtgtagtggatttcgagcgttgtttcgaaacgctcaaacagagtggctattgcgggccgtacctgattgagatgtggagcgaaacggcggaagacccggcggcagaagtggcgaaagcgcgtgattgggtgaaagcgcgcatggcgaaagcgggcatggtggaggcggcataatgcaaaagctaaaacagcaggtatttgaagccaacatggagctgccgcgctacgggctggtgacctttacctggggcaacgtcagcgctatcgaccgcgaacgcgggctggtggtgatcaagcccagcggcgttgcctacgaaaccatgaaagcggccgatatggtggtggttgatatgagcggcaaggtggtggaaggggagtatcgcccatcttccgacactgcgacgcatctcgaactctaccgtcgttacccgagccttggtggcattgtccatacccactccactcatgccaccgcatgggcgcaggcggggctggcgatcccggcgttaggcaccacgcacgccgactacttctttggcgacattccgtgtacgcgcgggttaagcgaagaagaggtgcagggcgagtatgaactgaacaccggcaaagtgattatcgaaacgctgggcaacgccgagccgctgcatacgccgggaattgtggtgtatcagcacgggccgttcgcctgggggaaagatgctcacgatgcggtgcataacgcggtggtgatggaagaagtggcgaaaatggcgtggattgcccgcggcattaacccacaactcaatcacatcgacagcttcctgatgaataaacacttcatgcgtaaacacggtcctaacgcttattacgggcagaagtaaaacacgcgctgcggaaatttccttcctcgggagataactggtctaattccgcagccgtttttcaaaaaaaagccccctgcgaagggggcaaagcaaactatggcaatgtttcgttggttatacctggtgttagcgataaatatccgcgctggcgtgcatattgccgttactccccggttcccgcatcagaattacgtggtagtacgttgcgccttgcgcatctgtttcttcatttaatgcctgacgtgcttcgctttcagtggcgaaattatgattgatataaatcacgcctaagctttgcacatcgtccatatttctggcctggtggttattaatttcaatggctgcccatgtatttgcacttagcaaaagcacagccagaagggctaaaacacgactgaacatagatacctcctcgacggctgactttgtgtgctctcctctgtgatgatcttctgatttaattttaatcaatgataaagaagttgatggtgaccatttctgatgcagttgttcaaaaaaacaccatgatgaagtgtgatgaacttcaaatcagcgtgttagaggttaattgcgaaaggggagatttatttcggctctgcccttgagtttagcgaggcatacaagtactataacgcgtcatttttcagccgacctttaacacgttccttgcctccccgggattcggctgacccagacaggaggctgaataatccgtaaggagcaattcgatgcgtcattacgaaatcgtttttatggtccatcctgaccagagcgaacaggttccgggcatgatcgagcgctacactgctgccatcactggtgcagaaggcaagatccaccgtctggaagactggggccgccgtcagctggcttacccgatcaacaaactgcacaaagcacactacgttctgatgaatgttgaagctccgcaggaagtgatcgatgagctggaaactaccttccgcttcaacgatgccgttatccgcagcatggttatgcgtaccaagcacgctgttaccgaagcatctccgatggttaaagcgaaagacgagcgccgtgagcgtcgcgatgatttcgcaaacgaaaccgctgatgatgctgaagctggggattctgaagagtaatttctgatgaccaaccgtctggtgttgtccggcaccgtgtgcagggctccccttcgaaaggtcagtccaagtggaattcctcactgccagttcgtgcttgagcatcgttctgtgcaggaggaagccggctttcaccggcaggcgtggtgtcaaatgcccgttattgttagcggacacgaaaaccaggccattactcacagtataacggtcggcagtcgcataaccgttcaggggttcattagttgccacaaggcaaagaacggactgagcaaaatggttttgcatgccgagcagattgaattgatagattctggagactaaccatatggcacgttatttccgtcgtcgcaagttctgccgtttcaccgcggaaggcgttcaagagatcgactataaagatatcgctacgctgaaaaactacatcaccgaaagcggtaagattgtcccaagccgtatcaccggtacccgtgcaaaataccagcgtcagctggctcgcgctatcaaacgcgctcgctacctgtccctgctgccgtacactgatcgccatcagtaatcggtcacggtccattaatacgactttgagaggataaggtaatgcaagttattctgcttgataaagtagcaaacctgggtagcctgggtgatcaggtaaacgttaaagcgggctatgctcgtaacttcctggtaccgcagggtaaagctgttccagctaccaagaaaaacattgaattcttcgaagctcgtcgcgctgaactggaagctaaactggctgaagttctggcagctgctaatgctcgcgctgagaaaatcaatgcactggaaactgttaccatcgcgtctaaagctggcgacgaaggtaaactgttcggttccatcggtactcgcgacatcgctgacgctgtaactgcagctggcgttgaagtggctaagagcgaagttcatctgccgaacggcgttctgcgtaccactggcgaacacgaagtgagcttccaggttcacagcgaagtattcgcgaaagtgatcgtaaacgtagtagctgaataattcgttattcaacgagacgtaaaaacgccgaccattggtcggcgttttgctttctatttttcgtcaggtattagtttcgcaagtagatccattcaccattctcttgtgtccataagtcaggatggtttgctggcgttagatacatacgagcgcaactgatgtctcgctcctgcggcactcgctcgaaacccaaaccgctgtagattgcggcactactacttaaggaacgcagaccaattttcaaatcatggggtaaatcagaatacgcgtttagcaatgcagcaatgatgaatccgagggcattagaaacgcctgtaacagtgcgaagttggtcgatataaagatcgattgttggtagttcagaactccagcaattaggcatttgggcaggaagggttacaacgtatcctatcgtttggccggtatagtctggagtaccataaccaggtcccaaaaccacttcgtgtattgtgtatttactgttgggttcgaaggattcgacatcttgcaataaatatttcagttctgcggttaacctcgcacccgcgtaagctttattgtatttctgggcgtgaatattatctaatgtagcttcatggttccatccaaaagaattatcaccattcattgtgattccatcgtaagcattacacctcgtcgctaacttattgaatgcttgccagtcactgagatctagtttgtggatctcaacagtacgtctgccatcgcaattatgatctcttccacgattactaagtaatgtagcgcgtgcgtattgatgaaattttaattttactggtttgtcggtggagctaaaacgagataaatatgcaggaaaactataaatagtcgttggtaatgtcattgtaatgttacctgtttaatgtttttataaatatcgcagctgaatgttcacagaaaaaaatcgatattaataaaaataagtttgttttctgaagtggtgaaaatagcggatggtgaaagatattaatatcaaaaatcgctcattatggatataacgatgcacccggggagaaaatgacttccacgccttacaccgtacattcttgttgtgcggtatgtaattattctacgctgtcggtatcggtgtattcgttaatcagcaggttagccagccacaaaaagccattgagaaaattattgattttacatgggattattatattgctaatccttggtttttaaaaattgtgcatagtgaaaatcaaagtaaaggtgtgcattatgcaaaaagtcagcgtctcttagaaattaaccatgcgcacttgcagttaatggaatccttattggatgaagggaagaaacacaatatttttaagccagatatcgacccattgcaggtgaatattaatattgctgcgcttggcggatattatttgatcaaccagcatacgcttggcctggtttatcacatcagtatggttagtccccaggcactggaagccagacgtaaggtcatcaaagagacaatccttagctggcttttggttgaccctagttctaccgcgcacgaataattaccgcgcacgaataaaactgccatccggctggcgggtgaacaggacctgttgattattccccgtatcaatggttaagcccgtcaccacgccgctggcgttctggcggattttcaccatctgcccgttttgcaaattactcagcggcttacccgcgccttctacctgcgccattgcatagacatcggtagcgggcagtccgtggtcgcggaacagctgcgccatcgttttaccgggttcgacacggtaagagcgccattgattatcaattccgctatctggctggaatggttgcgtttgggtagtttgcggctgctcttctggctggccttcctgtataggttctggagcgaccggagccacctgatcaggaccattttgtggggtaactaattgcgcccgcagctgttcttctgtcggcggttgactttggctctgaatatctaactgcgcttcacgcgtcaccaccggcgcgttgggcgtatcatcagatggaagcagaaatccgaccaccaatacaatggcggcaataatgatcccccgacgatgcatcggcggcagcgggtccatgaagcgaaaattgtccggcgcgtgccagactttctccagggttggttttagttcaaagcgcccgggcatggtttcctcctgctccgcgtcttgttcctcaatcatagcctatgaataagctaacgctatgatgtccgtggtaaacccgcctttattatattcatacgggatattgctattgtttctttttccctgggatttgtcatcattcccgcgacaaagttttacccaaagaagtgtggctgatatgctgcccgctactttataccctaagaaaggaaatacgatgaccaccccaacttttgacaccatcgaagcgcaagcaagctacggcattggtttgcaggtagggcaacaactgagtgaatctggcctggaagggctgctgccagaagcactggttgcaggtattgccgatgcgctggaaggcaaacatccggctgttccggttgatgtggtgcatcgcgcgctgcgtgaaatccacgagcgcgccgatgccgttcgtcgtcagcgtttccaggcgatggctgctgaaggtgtgaaatacctggaagaaaacgccaaaaaaagaaggtgtgaatagcaccgaatctggcctgcaattccgcgtgatcaaccagggtgaaggcgcaattccggcacgtaccgaccgcgttcgtgttcattacaccggtaaactgatcgacggcaccgtgtttgacagctccgttgctcgtggtgaacccgctgaattcccggttaatggcgtgatccctggctggattgaagcactgactctgatgccggtaggttctaaatgggaactgactatcccgcaggaactggcatatggcgagcgcggcgcaggcgcatccatccctccgttcagcaccctggtgtttgaagtcgaactgctggaaatcctctaagcagcgcattctgttcccctcgaacgagaggggagcaggcattcagcaataaacccttcagtttgccaaacggcgctattttgtgttgcaaagaccccgtaagcgtgtatttttgtgagctgtttcgcgttatcaccgtgatatgacactcactttaaacataaaattaacattagatctaaatcttagtattcatcccgcgtattgttacctaatatcgatgagtcccgatacagattcgtcgtatcatagactgactaaaggccgtagagcctgaacaacacagacaggtacaggaagaaaaaaacatggtagatcaggtaaaagtcgttgccgatgatcaggctccggctgaacagagcctacggcgcaatctcacaaaccgacatattcagcttattgccattggcggtgccattggtacggggttgtttatggggtctggcaaaacgattagccttgccgggccgagcatcattttcgtttatatgatcattggttttatgctctttttcgtgatgcgggcaatgggggaattgctgcttagcaatctggaatacaaatcttttagtgacttcgcttccgatttactcgggccgtgggcaggatatttcaccggctggacttactggttctgctgggttgtaaccggtatggcagacgtggtggcgatcacggcttatgctcagttctggttccccgatctctccgactgggtcgccagcctggcggtgatagtgctgctgctgacgctcaatctcgccaccgtgaaaatgttcggtgagatggagttctggtttgcgatgatcaaaatcgtcgccattgtgagcctgattgtcgtcggcctggtcatggtggcgatgcactttcagagtccgactggtgtggaagcgagtttcgcgcatttgtggaatgacggcggctggttcccgaaaggtttaagtggcttctttgccggattccagatagcggttttcgctttcgtggggattgagctggtaggtacaacagctgcggaaaccaaagatccagagaaaagtctgccacgcgcgattaactccattccgatccgtatcattatgttctacgtcttcgcgctgattgtgattatgtccgtgacgccgtggagtagcgtagtcccggagaaaagcccgtttgttgaactgttcgtgttggtagggctgcctgctgccgcaagcgtgatcaactttgtggtgctgacctctgcggcgtcttccgctaacagcggcgtcttctctaccagccgtatgctgtttggtctggcgcaggaaggtgtggcaccgaaagcgttcgctaaactttctaagcgcgcagtacccgcgaaagggctgacgttcagctgtatctgtctgctcggcggcgtggtgatgttgtatgtgaatcctagtgtgattggcgcgttcacgatgattacaaccgtttccgcgattctgtttatgttcgtctggacgattatcctttgcagctaccttgtgtatcgcaaacagcgtcctcatctacatgagaagagcatctacaagatgccgctcggcaagctgatgtgctgggtatgtatggcgttctttgtgttcgtggtcgtgttgctgacactggaagatgacactcgccaggcgctgctggttaccccgctgtggtttatcgcgctggggttgggctggctgtttattggtaagaagcgggctgctgaactgcggaaataaccgcattatcatgctggatggcgcaatgccatccagcttttagatcactcacccgccagcgcgcgtgggaacagtacattgttttccagactgatgtgatccatcaggtcatcaatcagttcattaatgccgttatacatcgctttccaggtggtgcaggcttctggcggcggtgtgacgttattggtggtgtgtttaatcacttccagcagttcgcccgcttcatcgtgctcgctttccattacgctgattggccccattgcctggctgcccatgccttgtttgatcatcgggaagaggatctgctcttctttcatcatgtggctggaaagctcttcatgcagcatggtcaggtattttgtcagcccttttggcacgctcggtttgtcggcgtgaacgcgctcgactttagtcgcttgcagaatcagctccggcagttgctcgcggtgacgatcgtggtagcgcacgatgatatggtcgatgatttctgccagcggggcgctacgccagtctttctcaatcggttgttcagcgagctttgccagttcagcttcaatgacctcaacatccagttctttacgtgccgccgcgcgcgccagcgtctgcttaccgccacagcagtaatccatatcatatttacgaaacagagcactagcgcgaggaatagagagcgccagttcacctaaaggttggtcgcgataagccatagctgatacctcattcttaataagataagatgtattttaaatgcatctttaaggcaaaagctataacccttacgtagcagaggcttatttaactcactgccagcgtgtcaactttcactgacagattcagttaaaggtttttctggttttgctctgaccgcgatgaccacgccaatcactaacagcgcgataccgctcagcgtcattagcggcggcatttgctggcggagtaaaaaggtgtacagcaaacctgccagcgtttcgaaaacaatcagcggcccgagaatcactgtcggtaatagctggctggcgacgttccagcagagtgcgccaacccaactgcaaagcacggctatcgcaaccatcagactaataaacaccagcggacgggggccaaagggtagggagaagtccggcgtttgcgtattcagccagtaacaagcgacgagatagccgataagactaaccggcagtgtgaccagcgcctgcgctgttgcccacatcatcggatgtttgtcgggattttcccgcagccagcgggcgttgcgcagggcataccacgcccagcagaccacggaaactaacgccagcacgatgccagaggtataacgtgcccagtcaaaatcggggagtccgtggtttaactcagcaatattcacacacgccaggccgatgccaatacaaatcagtgctggggcgagttttccccacgcgagtttgccgtcgcgctggctataaagcagattggcaaagacaggaatgaccaccggcagggtgccgataatcatcgtggaaacaggcgcgccagtacgttgaatggcactggcaaggcagaagtaatagatgaggttgcccatcatagtgagcatcaaggcggtaagccagtcgcgacgcgccaactgacgcagacgcacgcgtcccagccaggcaatgggcagcgcaattaaccctaacgccagataacgccccatgctctgcaacatcgccgggtattccggcacgatcaacggcccgacaaaaataagcccccacatcaaccctgctaacagggcgtacagcacgccgctaatcattactggcatccattgatctgtcagaagaaagttcaggaagcagacatgattgctcccggcatcccgtcattatcagagaggatgcgggaggatgccactttaattaattagttattaacattaaaaagatggcttacgctttcggctaacgttgtcgttgggtggccaatcaatttgctaagtgttttgctgtcatcaaacagaccgcctttgcttgcgccaacgtcagaatccgccagcatatccgccagtccgtcgggcagtccgacgcttttcagtgccgcggcgaaatcggcttcgctcagattttgataggtaacctgtttgccgctctgtttggtcagctctgccgctaactgtgtcaacgtccaggcactatcgcccgccagttcgtaaaccttgccttcgtgaccggcttcgctaatcacgcgtgccgcagctgccgcataatctgcccgcgttgcactggcgattttgccatcgcccgccgcaccgataaatacgccgtgttccagtgctgccggggcgctggcgaggtagttttcgctgtaccagccgttgcgcagcagggtgtaaacgatgccagaatcagccagcattttctccgtctcgatgtgctcatcggcgaggccgagcggggaggtatctgcatgtagcaggctggtataagcgataaatttcacgccagccgcctttgcggcattaataacattacgatgctgcggggcacgttgacccacttcgctggaagagatcagcagtagtttttccactccctgaagtgcagatgtcagtgcggcttcatcgccgtagtcagcctgacgcacggtaatgccttgtgctgccagggcttgggcttttgccggattacgaacgatagccactatttggctggcaggaaccgttttcatcaaggattcaataacatagtgaccaagttggccagtggcaccagtaatagcgatcatgggaagtctccatcgttttgtcttgtgtttaaatacgctaacacctaaacttacttttagtaagtacgtacaaaaaggtaagtatgaaatgagtcaggttagcctgagccaacaactgaaagagggtaatctctttgcggaacagtgcccgagccgcgaggtgttgaaacacgtcaccagccgttggggggtgttgattctggtggcgctacgcgaaggtactcatcgctttagcgacctgcggcgcaaaatcggtggggtgagtgaaaagatgcttgcgcagagcttacaggcgttagaacaggatggttttcttaaccgtatcgcgtatccggtggtgccgccgcatgtggaatatagcctcacgccgctgggcgagcaggtgagcgaaaaggttgctgcactggcggactggattgagttgaatttgcccgaggtgttggcggtgcgggatgaacgtgcggcataactgccggatgcgctgagcttatctggtctacggtgcatggcttgtagggcggataagatgcgccagcatcgcatccgccaataaatgccggatgcggttgatgatttataggccgaaaaagaagtgttttacttactcaaatccacctgataaatcgcaaacccgatatcatcggtcgcgactttattcatcggatactgccctttctctttaataaacgctgcggctttatcactcggagaggtttcgaaacggatatccagtttcttatcgccagctatcggtgctaaacgccagttgttatctgccgccgggtgaatttcccccgcacgtttgctctcatcagcaatccacgctgccagcacgctgcggttctcatccggactagcaaaagcgatatggctgtcgcccgtaccggcaaatttgccgccgtaagcgcgatagttattggtggcaaccaggaacatggcgttcggatcaatcggcttgccattaaaggtcaggttcttaatcctttccgcattggcattaatcatctggcactcgccgtcataacgggcgggctgggtaacatcaatctgataattcacaccatcaataacatcaaagttataagtgcggaaaccatcccagttgatgagactctgtggtttcgtgctgttgggatcaatctggttaaactgtcccgcggagcactccagccactctttcacctctttaccgctggctttcaccacaatcagcgtattgggatagagataaagatcggcggcattacggaaggtcaactggcctttttccacctccacatagcttgccgggtcatttttgcgaccaccgactttaaacggtgcggcagcactaagcaccggcagttttgccagatccggatcgccctgaatgtaatgctcgacatacgctttttgcgcgttgttcaccacctgcacggtcggatcgtcctgcaccagcgccagatagctatacatattgtcggcagatttaccgattggcttgctgacgaactggcgtgtggcatcgtgatcggctttgagtgtttctaccagcttgctgtcttccgccgcgagggattttttattagcgatgtcgtaaatcggtcgtgcttccgctttcgcctgcgtcacctgccatttaccgctgtcattactgagttgtaagtcgaccacaccaagatgatcgccccacatgcctggcattaccgccggaacaccattcagcgtgcctttggcgatatcagccccttcgatatcagcaaaatctttacctgggaaaacggcgtgagcatggccaaacataatggcgttaacgcccggaatttcactgaggtaataaacactgttttccgccatcactttatacggatcggcagatagcccggaatgtgccagaacgacaacaacatcggcacctttctcgcgcatttcaggcacgtatttgcgcacggtttcggtaatatcattcaccgtcactttcccggataaattagctttatcccagcccatgatttgtggtggcacgacgccaatatagccaatcttcagcgtctgtttttttccgtctttatcgaccacttcggtgtctttaattaaatacggtgtaaacattggctgtttggttctggcgtcaatgacgttggcatttacataagggaatttcgctcctgccagcgcatttttcaggtaatccagaccgtagttaaactcgtggttgccaagcgttccgacggtatagtccagcgtatttaatgccttatagaccgggtgaatatcacctgcttttaatcctttcgcgctcatgtaatcggccagcggactcccctgaatcaaatcgccgttatcaaccagtacgctgtttttcacttcattgcgggcatcgttaatcaggcttgccgtacgtaccagtccgaatttttccgtggcggtgtctttgtaataatcgaaatccatcatgttgctatgcagatcagtggtttccatgatacgcagatcgaccgtcgctgcattcacactggcggcaatcagcgtggccaggagcgttgcgctaaacttaatcatcagggacatccttttatcatcgggaatacgaaagaaaagggagaataaacgtcttacttatagaacagtgaagaatgccacaattttacgctttgaaaatgatgacactatcacagttggcgcattcattaacgatagggtataagtaaaacaataagttaacaccgctcacagagacgaggtggagaaatgttagatcaagtatgccagcttgcacggaatgcaggcgatgccattatgcaggtctacgacgggacgaaaccgatggacgtcgtcagcaaagcggacaattctccggtaacggcagcggatattgccgctcacaccgttatcatggacggtttacgtacgctgacaccggatgttccggtcctttctgaagaagatcctcccggttgggaagtccgtcagcactggcagcgttactggctggtagactcgctggatggtactaaagagtttattaaacgtaatggcgaattcaccgttaacattgcgctcattgaccatggcaaaccgattttaggcgtggtgtatgcgccggtaatgaacgtaatgtacagcgcggcagaaggcaaagcgtggaaagaagagtgcggtgtgcgcaagcagattcaggtccgcgatgcgcgcccgccgctggtggtgatcagccgttcccatgcggatgcggagctgaaagagtatctgcaacagcttggcgaacatcagaccacgtccatcggctctagcctgaaattctgcctggtggcggaaggacaggcgcagctgtacccgcgcttcggaccaacgaatatttgggacaccgccgctggacatgctgtagctgcagctgccggagcgcacgttcacgactggcagggtaaaccgctggattacactccgcgtgagagcttcctgaatccggggttcagagtgtctatttactaaattcagatggcagaaacagtgtatttcctgattctgccatcctgatttctcccaacctaaaaagttataaataaaaagagattgtatttaaagtgcaaaaattcaattgctaataagttacattttaataatgagcgttttttgatagtttacttctatagtgagatatttaatggcgacataaagtaaccaaataaaataaggttgtcatatgttacccaggatcagacacaataattttattggtgcggtggagttatttgtaaagtctagctatacaaaaacacatagtaacaatttttttaacaacatccatcatgcatttaagaaaaaagattggattagcaattatgatagcctgttaactttgagggagttctttcgttgcgcaactcagattgataaaagtggttatcaggtgcttagtagtaaaaatgaaactgttcacgccatggataagtttcttatcagtttcagccttaaagataacggtgccgaatatacaatgacattgcgaggtagtggatttgaatacgaagaaatacccataacaataaatgaatataacagtttcatggatttcaaaaaccgtgaatttccgttagaacaaaacagacgattgtatgcccgggatattctacagaaaaaacagtctgacataccgaaaaggattaaaggttatattcaccaggcgattggtgacgtgtctttaggttatgccttattggaggatatagtaagcaaattaaaacggggtaaatttgaactccaaataccaggaggtggaattaaagaatgcgatggatggtatatttacgaaaaaataattgatgataattttgccatagtcatagaatctttgggctttgcgcttaaaatctatggaggggatgaacgttttcgtaatggttcctctgttgttttggaggatgaagattactctcttatttataattttctggttaatgcaggttgccaacaagtcgaattagccgaacaagtggatgcgatagtaagtgcgaatctggccgcagatagcgatattaccaaagaaaagatttgcgagaaatataaaagcaccattgaggcgtttaaaaaagagcaactagcgttaccagtattagttcggcgtaagaacagtgagacttaattcccctatcccatagataacgataggggaaaattatttttgcagaatttatgttattgccattatttgagcaacttttgcagcaggtccatcacttgctgcacctcttccggtgtgagcgccccgtctttggcccattgcacgcgaccatccttatccagcaccactacagcggaactttcttcatccagctgccaggcaccgagcgcgacgccattgctatcgacaataaactggctccagggataaagctttttattactctccagactgctgcgcacaaacatcccactacccggaatcgcgtcgtcggtgttaacaatggtggtggtctggtaacgatcgtgcggtaacttcgcacttttaatcgcttcaatcagcgtcgcgtttttctcttttgcagaggtgcgaccagcaatatgttgcagtactcgcacttttcccactaactgcgcgctgttccaggttttgtagctaaactgatctttatcaagcaccaactcgccccgatcggtaatgccaatcggcggcactcgctgaccggtttcgaactgatgtgcggaagccatcatcggcaacagcaggcaggtgagtgccagaatcttgcgtagggtcatggtgtttccttcttatgatatgcaggtgatccgaccacttgggtctgagttttaatcatatgtgctatttatcgaatttcccgcaagtgtgatgccagtttgcggtcaagcgcacaaatcatatgaaaaatgaatgcttatactgaagaccgcgcttcggtaaaaagataattctgaataattgtaacctttaggtaaaaaaagttatacgcggtggaaacattgcccggatagtctatagtcactaagcattaaaatttgcgcctcataatagttgggccgattgtggcaccgcacaggcgtaatactcagcaggagataacaatgaaaattttccaacggtacaacccacttcaggtggcgaagtacgtaaagatcctgttccgtggacggttatacatcaaggacgttggcgcttttgaattcgataagggtaagattcttatcccaaaagtgaaggataagctgcatttgagtgtgatgtccgaagttaaccgtcaggttatgcgtctgcaaacagagatggcttaaccaaagtgctatgcagtaaaaagtgctatgcagtaataagacggctcctgattcaggagccgttgatgtttctgggggttacgcgacgctttcttctttatctttagcgtcaggcagttttgggctaagggcggtggccttgctgtcgatccgggtcaccagcagctggtcgatgcggtagttatcgatatccaccacttcaaatttgtagccggcgaatttcacgctatcggtgcgtttcgggatcttacgcagcataaacatcataaagccgccgatggtttcgtagttgccgctctgcgggaactcgtcaatatccagcacgcgcatgacgtcgtcaattggggtgccgccgtcaatcagccaactgttctcatcacgggcgacaatctgctcttccagcccctgaccgaccagatcgcccatcagcgtggtcatcacgtcattgagggtgatgatccccaccaccagcgcgtactcgttcatgatcaccgcgaagtcttcacctgcggttttaaaactttccaacgcctcactaagggttaacgtatccggcacaatcagcgtgttgcgaatttgtacgccgctgttcagtgccaggctttggttagccagcacgcggttcagcaggtctttagaatcgacataaccgatgatgtggtcaatatcttcattacagacgaggaacttagagtgcggatgttccgccaccttattcttcaggctttgctcatcttcgtggagatcaaaccaaatcacgttttcacgcggtgtcatactagacggaacggtacgggattccagctcaaagacgttttcaatcagctcgtgttcctgtttacgtaacacgcccgccagcgcaccggcttccactaccgcgtagatgtcatcagaagtgatgtcatctttacgtaccattggcagtttgaaaatacggaagattatgttcgccaggccgttgaagaaccacaccagcggggtgcaaacgtacaggcagaagcgcatcgggttgatgatacgcaaagccacagcttctggcgcaatcataccgatgcgtttcggggttaaatccgcaaacaggataaacatgccagtcactaagctgaaagagagaataaagctcagttgctcagagagctctgcgctcatatagcgggagaacaggctgtgaaaagctggagaaaatgccgcatcaccgacgataccgccgagaatcgccactgcgttcagaccgatttggaccacggtaaagaacatgccgggattttcctgcatattcagaacgcgttgggcatttatattgccttcatcagccagcagtttaagtttgattttgcgactggcggcaaggctgatctcggacatgctgaagaacgcacttacagcgatcaagcagagtatgactaaaatactgtttaacatatcttatccgacctttcaggccagatcctcggaaggggaagttgattaatttgtgtgaaatacacattgaaagccgattcgaagaaagtgaaccggcattttcagtggctagtatagcgtaaggtactgtaaagccgccagagggttaaaattcagacagctgaaaaatgcaaaactgcctgatacgctatgccgatcaggcctacgcagtccttgcaatatattgaatttggacgattttgtaggcctggtaagtcgtttacgccgcatcaggcatagacaaagagcactttatcaacaaactacatttgtacccgtaacgttatgcttccggcggcagacagacgccaattccgccaattccacagtaaccatacgggtttttatgcagatattgctggtggtcatcttcggcataataaaacggtgtggcgttagcgatttccgtggtgatgtgacgatcgtcatcggcggcaagcatcgccgcctgaaaacgttccagactggcgcgagctgcggcatcctgttctggggtcagcggataaatcgcactacgatactgcgtgccgtggtcattgccctgacgcattccctgggcgggatcgtgattctcccaaaatacctgtagcaactgctcatagctgatgacggaaggatcgtaaacaatgcgtaccgcttcggcatgacccgtatcaccggagcacacttcccgataagtcggatttggcgtatagccgccggtatagcctgcggcggtgctgtaaacgccgggtaactgccagaacagacgctccacaccccagaaacaacccatcgcaaaaatggcaatctccattccgtcaggtacattggtcatactgtgaccgttgaccgcatgcagcgtggctacgggcatcggggtgttacgtccaggcagggcatcggcgggggaaaccagatgctttttatcaaataaactcatggtgtcgctctcccgaaaatcggtcattggggttaaggttgtaacaagaggcgtatttgcacacaataaccaccgtgaataggtctaaagtaaaacataagaaatatttggggtttagtctgctttttaatccatattactggatttttgttaagccgtttaacggcgttccaggggcaggaaaaaaggatattcaggagaaaatgtgcgctatatccgacagttatgctgtgtaagcttactctgcttaagcggatctgccgtcgccgcgaacgtccgtctacaggtcgaggggttaagcggacagctggaaaagaacgttcgtgcgcagctttctacgattgaaagtgatgaagtgacgccagaccgtcgctttcgcgcacgcgtcgatgatgccatccgcgaaggtctgaaagcgctgggttattaccagccgaccattgaatttgatctccgtccaccgccaaagaaagggcggcaggtattgatcgccaaagtcacgccaggcgtgccggtgttaattggcggcaccgatgtggtattgcgcggcggcgcgcggaccgataaagactatttgaaattgctcgatactcgcccggctattggcacggtactgaaccagggcgattatgaaaatttcaaaaagtccttaaccagcattgcgttgcgtaaaggttatttcgatagcgaatttaccaaagcgcagctgggcattgcgctcggcctgcataaagccttctgggatattgattataacagtggcgaacgttaccgctttgggcatgtgacctttgaaggaagtcaaatccgcgatgaatacctgcaaaatctggtgccgtttaaagagggcgatgagtacgaaagcaaagatctggcagaactgaaccgccgactttctgctaccggctggtttaacagcgtggtggtggctccacaatttgataaagcgcgcgaaacgaaagtattaccattgacgggcgtggttagcccgcgaacagaaaacaccatcgaaaccggggtcggttactctacggacgtgggaccgcgcgtgaaagcgacgtggaaaaagccgtggatgaactcttatggtcacagtctgaccaccagtactagtatttccgcgccggaacagaccctcgacttcagctataaaatgccgctgctgaagaatccactggaacaatattatttggtgcagggcggttttaagcgcactgacctgaacgataccgaatctgactccactacgctggtggcttctcgctactgggatctctccagcggctggcagcgtgccattaacctgcgctggagtctcgaccactttactcagggtgaaattaccaataccacgatgctgttttatcctggggtgatgattagccgcacgcgttctcgtggtggcctgatgccaacctggggcgacagccaacgctactctatcgactactccaacacggcctggggtagtgatgtcgatttctccgttttccaggcgcagaacgtctggatccgcacactgtacgatcgccatcgttttgttacacgcggcacgctgggctggattgaaaccggtgatttcgacaaagtaccgccggatctgcgtttcttcgccgggggcgaccgcagtattcgtggctacaaatacaaatctatcgctccgaaatacgccaacggtgacctgaaaggggccagcaagttgataaccggaagcctggaataccagtacaacgtgaccggaaaatggtggggcgcggtgtttgtcgatagtggcgaagcggtaagcgatattcgccgcagcgactttaaaaccggtaccggggtcggcgtgcgctgggaaagcccggtcgggccaatcaaactcgattttgccgtaccggtcgcggataaagacgaacacgggttacagttttacatcggtctggggccagaattatgagtttatggaaaaaaatcagcctcggcgtggttatcgttatcttactgttgctgggaagcgtggcgtttctggtgggcaccaccagcggcctgcatctggtatttaaagcggcggatcgctgggtgccaggactggatattggcaaggtcaccggcggctggcgcgatctcaccttgtctgacgttcgttatgagcagccaggcgtggcggtaaaagcgggcaatctgcatctggctgtcgggcttgagtgcctgtggaacagcagtgtttgtattaatgatctggcgctgaaagacattcaggtcaacatcgacagtaaaaaaatgcctccttctgaacaggttgaagaagaggaagatagcggtccgctggatctctccacgccgtatcccatcaccctgacacgggtggcactggacaacgtcaacattaagattgatgacaccacggtaagcgtgatggacttcacctccggcctgaactggcaggagaaaaccctgaccctgaaaccgacgagcctgaaaggcctgctgattgctctgccgaaagtggcggaagtggcgcaggaagaagtggtcgaaccgaaaattgaaaatccgcagccggatgaaaagccgctcggcgaaacgctgaaagatctcttttctcgcccggtattgccggaaatgaccgacgtgcatttgccgcttaacctgaacattgaagagtttaagggcgagcagctgcgcgtgacgggcgacacggacatcaccgtgagcaccatgctgctgaaagtgagcagcattgacggcaatactaaactggacgccctggatatcgattccagtcaagggatcgtcaacgccagcggcacggcgcagctgagtgacaactggccggtggacatcactctcaacagtacactgaacgtggagccgttgaaaggtgaaaaagtgaagctgaaaatgggcggcgcgctgcgcgaacagctggagattggcgttaatctttccggtccggtggatatggatttacgcgcccagacgcgactggcggaagccggattgccgctcaacgtggaagtgaacagcaaacagctttactggccgttcactggtgagaagcagtatcaggcggatgatctgaaactgaaacttaccggcaaaatgaccgattacacgctctctatgcgtacggcagtgaagggacaggagatcccgcccgcgactattaccctcgacgccaaaggtaatgaacagcaggtcaatctcgacaaactcaccgtcgcggcgctggaagggaaaactgaactcaaggcgttgctcgactggcaacaggccattagttggcgcggtgagctaacgcttaacggcattaacaccgccaaagagttcccggactggccgagcaaactcaatggcttgattaaaacccgcggtagcctgtacggcggcacctggcagatggacgtgccggagttgaagctgaccggtaacgttaaacagaacaaagtgaacgttgacggcacgctgaaaggcaacagttatatgcagtggatgatcccagggcttcatctggaactcgggccaaacagtgccgaagtgaaaggcgagctgggggtaaaagatctcaatcttgatgccaccatcaacgcgccggggctggataacgcgctgccggggcttggcggtacagcgaaagggctggtgaaagtacgcggcacggtggaagcgccacaactactggcagatatcaccgcgcgcggcctgcgctggcaggaactttccgtggcgcaggttcgcgtggaaggcgatatcaaatccaccgatcagatcgccgggaaactcgacgtacgcgttgagcaaattagccagccggatgtaaatatcaacctcgtcaccctgaatgccaaaggcagcgaaaagcagcacgagctacagttgcggattcagggggagcctgtctccgggcagcttaatctggcaggaagttttgatcgcaaagaagaacgctggaagggaactcttagcaatacccgcttccagacgccggttggcccgtggagcctgacccgcgatattgcgctggattaccgcaataaggagcaaaaaatcagcatcgggccacactgctggcttaacccgaatgcggaactgtgcgtgccgcaaactatcgatgcgggggccgaagggcgtgcggtggtgaatctcaaccgcttcgacctcgccatgctgaaaccgtttatgccagaaaccactcaggccagcggtatcttcacgggtaaagcggacgttgcctgggacaccacgaaagaggggctgccgcagggcagtatcacccttagcgggcgtaacgtgcaggtaacgcaaaccgtcaacgatgcggcgctgcccgtggcgtttcagacactgaatctgacggcggaattgcgtaacaaccgtgccgaattgggctggaccatccgcctgaccaataacggccagtttgatggacaggtgcaggtgaccgatccgcaaggccgccgtaatcttggtggcaacgtcaatatccgtaacttcaaccttgcgatgataaaccccatctttacccgtggggaaaaagcagcggggatggtgggtgccaacttgcgtctgggtggtgatgtgcaaagcccgcagttgtttggtcagcttcaggttacgggtgtggatatcgatggcaactttatgccgtttgatatgcaaccgagccagcttgcggtcaactttaacggtatgcgcagcacgcttgccggtacagtacggacccagcagggtgaaatctacctgaacggtgatgccgactggagccaaattgaaaactggcgggcgcgggtaacggcgaaaggcagtaaagtgcggatcaccgtgccgccgatggtacgaatggatgtaagcccagatgttgtattcgaggctacaccaaacctgtttaccctcgatggtcgcgtggatgtcccttgggcgcgcatcgtggtgcacgatctgccggaaagcgcagtaggcgtctccagcgatgtggtgatgcttaacgataacctgcaaccggaagagccgaaaacggcgagcattccgattaacagtaacctgattgtccacgttggcaacaatgtgcgcattgacgcctttggcctgaaagcgcggctgacgggcgatctcaatgtcgttcaggacaaacaagggctgggtctgaacgggcagatcaacatccctgaagggcgcttccatgcctatggtcaggatctgattgtgcgtaaaggtgagttactgttctctggtccgccagatcaaccgtatcttaatattgaagctattcgtaacccggatgctacagaagacgacgtaatcgccggagttcgcgtcactggtctggcggacgaaccgaaagcggagatcttctctgacccggcgatgagccaacaagctgccttgtcttatttgctacgtggacaagggctggagagcgatcagagcgacagtgcggcaatgaccagcatgctgattggtttgggggttgcgcaaagtggccagattgtgggtaaaatcggcgagacgtttggcgtaagcaatttagcgctcgacacccagggagtaggcgactcctcccaggtagtggtcagcggctatgtattgccaggtctgcaagtgaaatacggcgtgggtatatttgactctatagcaacactcacgttacgttatcgcctgatgcctaagctatatctggaagccgtgtctggtgtagaccaggcactggatttgctctatcagttcgagttttaacaatgcgaatatttgtctacggcagtttacgccacaaacaaggcaacagtcactggatgaccaatgcccagttactgggcgatttcagtatcgataactaccagttgtatagcctgggccactatccaggcgcagttccggggaacggaacggtacacggtgaagtttatcgtattgacaacgccacgctggccgaacttgatgccttgcgcaccaggggcggtgaatacgcgcgccagttgattcagacgccgtacgggagtgcatggatgtacgtttatcaacgacccgtcgatggattaaagctaattgaaagcggcgactggttagacagggataagtaaccatatgcatacgccaccttcgggtggcgttgttttttgcgagacgactcgcattctgttttgtaattccctcaccttttgcttttctctccgagccgctttccatatctattaacgcataaaaaactctgctggcattcacaaatgcgcaggggtaaaacgtttcctgtagcaccgtgagttatactttgtataacttaaggaggtgcagatgcgtattaccataaaaagatgggggaacagtgcaggtatggtcattcccaatatcgtaatgaaagaacttaacttacagccggggcagagcgtggaggcgcaagtgagcaacaatcaactgattctgacacccatctccaggcgctacagccttgatgaactgctggcacagtgtgacatgaacgccgcggaacttagcgagcaggatgtctggggtaaatccacccctgcgggtgacgaaatatggtaaagaaaagtgaatttgaacggggagacattgtgctggttggctttgatccagcaagcggccatgaacagcaaggtgctggtcgacctgcgcttgtgctctccgttcaagcctttaatcaactgggaatgacgctggtggcccccattacgcagggcggaaattttgcccgttatgccggatttagcgttcctttacattgcgaagaaggcgatgtgcacggcgtggtgctggtgaatcaggtgcggatgatggatctacacgcccggctggcaaagcgtattggtctggctgcggatgaggtggtggaagaggcgttattacgcttgcaggcggtggtggaataaggtgtgtttatttatcgcgggcataaaaaaacccttactaaccgaagcccggcgttcagggttattacgccagaagaacttatttattctttgcgcgctcgaaggaggcaacgatttcagctttagcggcttctgcgttttcccaaccttcaactttcacccacttgcctttttcgaggtctttgtagtgctcgaagaagtgagcgatttgcgctttcagcagttcaggcagatcgttaacgtctttaatgtgatcgtattctttgctcagcttgctgtgcggaaccgcaaccagtttcgcatcttcaccggcttcgtcggtcattttcagaacgccaaccggacggcaacggatcacagaacccggctgcagcgggtacggagttgggaccagtacgtcaaccgggtcaccgtccagagacagggtgtggttgatgtaaccgtagttgcatggatagaacatcgcggtggacatgaagcggtcaacgaacagtgcgccgctctctttgtcgatttcgtatttgatcggatctgcgttagccgggatctcaataacaacgtagatgtcttccggcagatctttacccgcagggacgttgagtaagctcatgtctgtttcctttaaaaatatgtggcaaacaagtgccgagtattatagccaactcgcgccgaatgtcttcgcttgttttcgtcttcattttcctttttcaccagttttaagacggtatacagagcaggaaaatccataaccgtagccgcatttttcatagtgagatgaaagcgattacaaacttgtgattaacgttttatttacttttttgaagtgtgatgtaacgcaatctgttacataacgaattgtctatagttttttcgcgaacatcttttaaccaataataactaccccgacgaggacaaccctatgtggaaacgcttacttatagtctctgcagtcagcgcagccatgagctctatggcgttggccgctccattaaccgttggatttagccaggtcggaagcgaaagtggctggcgtgccgcagaaaccaatgtggcgaaaagtgaagccgaaaagcgcggaatcacgttgaaaattgccgatggtcagcaaaagcaggaaaaccagattaaagcggtacgttccttcgttgcacaaggggtggatgcgatctttatcgctccggtggtcgcgacaggttgggaaccggtattaaaagaggcgaaagatgccgaaatcccggtattcttgctcgatcgttccattgatgtgaaagacaaatctctctatatgaccaccgtcactgccgacaacatcctcgaaggcaagttgattggtgactggctggtaaaagaagtgaatggcaaaccatgcaacgtggtggagctgcagggcaccgttggggccagcgtcgccattgaccgtaagaaaggctttgccgaagccattaagaatgcgccaaatatcaaaatcatccgcagccagagtggtgacttcacccgcagtaaaggcaaagaagtcatggagagctttatcaaagcggaaaacaacggcaaaaacatctgcatggtttacgcccataacgacgacatggtgattggtgcaattcaggcaattaaagaagcgggcctgaaaccgggcaaagatatcctcacgggttccattgacggtgtaccggacatctacaaagcgatgatggatggcgaagcgaacgccagtgttgaactgacgccgaatatggcaggtcccgccttcgacgcgctggagaaatacaaaaaagacggcaccatgcctgaaaagctgacgttaaccaaatccaccctttacctgcctgataccgcaaaagaagaattagagaagaagaaaaatatggggtattgagggttgctatgcctgatgccgattcgtaggccggataaggcgctcgcgccgcatccggcgatggtgcactgaagcctgatgcgacgcttaccgcgtcttatcatgcctactgggagcacgctttacaccgggggaaaccatgacgaccgaccaacaccaggagatcctccgcaccgaaggattaagtaaatttttccccggcgtcaaagcgttagacaacgttgatttcagcctgcgccgtggcgaaatcatggcgctgctcggtgaaaacggggcgggaaaaagtacgctaatcaaagcattaactggtgtataccacgccgatcgcggcaccatctggctggaaggccaggctatcagtccgaaaaataccgcccacgcgcaacaactcggcattggcaccgtctatcaggaagtcaacctgctacccaatatgagcgtcgctgataatctatttataggccgcgaacccaaacgcttcggccttctacgccgcaaagagatggaaaagcgcgccaccgaactgatggcatcttacggtttctccctcgacgtgcgcgaaccgctcaaccgctttagtgtcgcgatgcagcaaatcgtcgctatttgtcgggctatcgatctctctgccaaagtgctgatcctcgatgaacccaccgccagtctcgacacccaggaagtggagttactgtttgacctgatgcgtcagttgcgcgatcgcggcgtcagcctgatttttgtcactcactttctcgatcaggtctatcaggtcagcgatcggatcaccgtcttacgcaacggcagtttcgtaggctgtcgggaaacgtgcgagctaccgcagatcgaactggtaaaaatgatgctggggcgcgagctggatacccacgcgctacagcgtgccgggcgaacattgttgagcgacaaacccgttgccgcgttcaaaaattacggcaaaaaaggaacgatcgcaccgtttgatctcgaagtacgccccggcgagatcgtcggtctggctggattgctgggaagtggacgtaccgaaaccgccgaagtgatcttcggtatcaaacctgctgacagcggcacggcgttgatcaaaggcaaaccgcaaaacctgcgaagcccacatcaggctagcgtactgggcattggcttctgcccggaagacaggaaaaccgatggcatcatcgctgccgccagcgtgcgggaaaatatcatcctcgctctccaggcccagcgcggctggctacgtcccatttcccgcaaagaacagcaagagattgccgaacgctttatccgccagcttggcattcgcacacctagtactgaacaaccgattgaatttctctccggcggcaatcagcaaaaagtgttgcttagtcgttggctactgacccgaccgcaatttctgatcctcgatgagccaacccgcggcattgatgttggtgcccacgccgagatcatccgcctgattgaaacgctatgcgccgatggtctggcgctgctggtgatctcctccgaactggaagagctggtgggctatgccgatcgggtgattatcatgcgcgatcgcaaacaggtggcggagatcccgctggcagagctttccgttccggcgatcatgaacgccattgcggcgtaaggagaacagtgtgatgcctcaatctcttccggacaccactacgccaaaaaggcgctttcgctggccgacggggatgccgcagctggtagcactgttgctggtgctgctggtcgatagcctggtagccccgcatttctggcaggtggtgcttcaggatgggcgtttgttcggtagccccatagacattcttaaccgtgcagctcccgttgcgttactggcgattggcatgacgctggtgatcgccaccggtgggattgatctctccgtaggggcggtgatggctatcgccggagccacaacggctgcgatgacggtcgcgggattcagcctgccgattgttttgttaagcgccctgggcaccggcatcctggcgggattgtggaacggcatactggtagcgatcctcaaaattcagccgtttgtcgccactctgatcctgatggtcgccgggcgcggcgtggcgcaactgatcaccgccgggcagatcgtcacgtttaacagcccggatctcagttggttcggcagtggaagcctgttgttcctgccaacgccggtcattatcgcggtgctgacgcttatcctgttctggctgttgacccgcaaaacggcgctggggatgtttatcgaagccgttggtatcaacattcgggcggcaaaaaatgccggggtaaacacgcgaatcatcgtcatgctcacttatgtgttgagcgggctgtgtgcggcgattgcgggcattatcgtggcggcggatattcgcggtgccgatgccaacaacgctgggttatggctggagctggacgccattctcgcggtggtgattggcggcggaagcctgatgggcgggcgctttaacctgctacttagcgtggtgggggcgctgattattcaggggatgaacaccggaattttgcttagcggctttccgccagagatgaaccaggtggtgaaagcggtggtggtgctttgcgtgctgattgttcagagccaacgctttatcagtctgattaaaggagtacgtagccgtgataaaacgtaatttgccactgatgatcaccatcggcgtctttgtgttgggttatctttactgcctgacccagtttcccggttttgcttccacaagagtgatctgcaatatcctgaccgataatgcctttcttgggatcattgccgttggcatgacctttgtgatcctcagtggtgggatcgatctctccgtcggtagcgtgatcgcctttactggcgtgtttctggcaaaagtgattggcgatttcggcctcagcccgctgctggcgtttccgctagtgctggtgatgggctgtgccttcggcgcatttatggggcttctgatcgacgccctgaagatcccggcatttatcattacgcttgcggggatgttctttttgcgcggcgtcagctatctcgttagcgaagagagcattccgataaaccatcccatttatgacacgctcagtagccttgcgtggaaaatccctggcggcggtcgcttaagtgcgatgggactgctgatgttggcggtggtggttatcggcatattcctcgcgcatcgtacccgttttggtaatcaggtatacgccattggcggcaacgcaacgagcgcgaatctgatggggatttccactcgcagcaccactattcgcatttatatgctctccaccggactggcaacgctggcggggattgtcttcagcatttatacccaggccggatatgcgctggcgggcgtaggtgtggaactggatgctatcgccagtgtggtaattggcggtacgcttttgagcggtggcgttggaacggtattagggacgctttttggcgtggcgattcagggactgattcagacttacataaactttgatggcacgctgagttcctggtggacgaaaatcgccatcggtattttgttgtttatttttatagcattacagcgtggattaacggtgctgtgggagaatcgtcagagtagcccagtgacaagagtcaacattgcgcagcaataaaaacgcctctccgtgtggagaggcgcaggagattacgcgtccgggaactcacggataaagcgttcgacatcttcaaccatatggtcgttgccgacaaagaaactacggcgctggtgcagggtttccgggatgatatccagaatacgctctttgccatcgctcgctttaccgcccgcttgttccgccaggaatgccatcgggttgcactcatacagcaaacgcagtttgccgtccgggtggctggcggtgcttgggtagagataaataccgcctttcagcaggttacggtggaaatccgcgaccagactaccgatataacgactggtataagggcggttggtggatttatcttcttcctggcagaatttaatgtacttcttcaccccgttcggaaacttaatgtagtttccttcgttgatggagtaggttttgcctttctccgggaagcgcatccgttcctggcacaggcagaaaacgccgaggctaggatcgtaagtaaaggcgtgaacaccgcatccggtggtgtaaaccagcatggtagaggagccgtataccacgtaacctgccgcaacctgtttgttaccaggctggaggaaatcttcttccgttaccggcgtgccaacaggcgtaacgcggcggtagatggagaaaatggtaccgacagagacgttaacatcgatgttggagctgccatccagggggtccatcagcaccacgtattttgcgtgttcacagccttcaaagacgacaatctcatcttcttcttcagaggcaatgcccgcaacgatatcgcgtgctttcagtgcggctttcagtttttcattagcgaacaagtcgagtttctgctgaacctcgccctgcacgttctcagcaccgctggcacccaggatatcaaccagtcctgctttgttgatatcgcgatggataatcttggcgcccagttttattgcgctcagcaaagcagtgagctcaccggtagcatgagaaaactcgtgctgcttttcgacaataaattcacctaacgttttcataaaactttccctgcaatgtttatggagtaaagcgaccgcaacaatcttaacaaataatctcaatgttgcgctcaggtgaatcgcgccagcaaattacggattatcctgaaatgcgtttctcacttgcccgacatatgcgtaaaatgagcggcagattaaaaaaggatagtgacgtatgcgcattcatattttaggaatttgtggcacatttatgggcggtctggcgatgctggcgcgccagttaggccatgaagtaacgggtagcgacgccaatgtgtatccgccgatgagcaccttacttgagaagcaaggcattgagctgattcaggggtacgatgccagccagctcgagccgcagccggatctggtgattattggcaacgccatgacccgtggaaatccgtgtgtggaagcggtactggaaaaaaatatcccttatatgagtggtccacagtggctgcacgattttgtgctgcgcgaccgctgggtgctggccgttgccggtacacacggcaaaaccaccaccgcgggaatggcgacctggattctggaacagtgtggttacaaaccgggctttgtaatcggcggtgtgccggggaactttgaggttagcgctcatctgggcgaaagcgacttctttgttatcgaagcggatgagtatgactgcgccttcttcgacaaacgctctaaatttgttcattactgcccgcgtacgctgatcctcaacaaccttgagttcgatcacgccgatatctttgacgacctgaaagcgatccagaaacagttccaccatctggtgcgtatcgttccggggcagggccgtattatctggccggaaaatgacatcaacctgaaacagaccatggcgatgggctgctggagcgagcaggagctggtgggtgagcagggtcactggcaggcgaaaaagctgaccaccgatgcttccgaatgggaagttttgctggatggcgaaaaagtgggcgaagtgaaatggagcctggtaggcgaacataatatgcacaatggcctgatggcgattgcagcggctcgccatgttggtgtagcgccggcagatgccgctaacgcgctgggtagctttattaatgctcgtcgccgtctggagttgcgtggtgaagcgaatggcgtcacggtatatgacgattttgcccatcacccgacggcgattctggcaacgctggcggcgctgcgtggcaaagttggtggtacggcgcgcattattgctgtgctggagccgcgcagcaataccatgaaaatggggatctgcaaagacgatctggcacctagtttaggtcgtgccgatgaagtcttcctgctgcaaccggcgcatattccgtggcaggtggcagaagtggcagaagcctgcgttcagcctgcacactggagtggcgatgtggatacgctggcagatatggtggtgaaaaccgctcagcctggcgaccatattctggtgatgagcaacggcggttttggtgggatccatcagaaactgctggatgggctggcgaagaaggcggaagccgcgcagtaattcggccttagccagatatagtatgcgtaggccggataaggcgttcacgccgcatccggcatttgagcatagtgcctgatgcgacgcttgatgcgtcttatcaggcctacaggtgcaccgtatccggcaaaccatactcacatcaacaacgaaaattacccttcgttctccgctaactcgcgcagatactggaaaatctggcgtgcggatttcggcggcttattcccttctttctctttcttcgcgttgcggatcagagtacgcagttgctgacgatcggcatcgggccacagatttaatacctcagcgatggcgtcatcaccttgatcgatcagacgatcgcgcaggttttccagtttatggaacagcaccacctgctggttgtgacggtttttcagcttatccagcgcctgacgaataggctctacgtcgcgctggcgcagcatcttaccgatgagctgcaactggcggcggcgaccttccatcttaatacgctgggcgagctcaatagccgcgcgcagatccgcatctaacgggatcttatccagcgcgtttttccccagatcaacaatttccgcgccaaggcgttttagctcctcggcatcacgtttaatttcacttttactgacccagataatttcatcgtcttcgtcttcgatgtcatcaccgggaacgtcgtcgagccagtcttcgggctgcttagtcatctcaggctccttaaaaaaagaggctaatgttaccagttaagatgcgcactgaaaaacggttctctgttagacttcagagaaactctctacattatggcacttgcaatgaaagtaatctctcaagttgaagcgcagcgcaagattctggaagaagcagtttccactgcgctggagttggccagtggcaaaagcgacggtgcggaagttgccgtcagcaagaccaccggcattagcgtaagcacgcgttatggtgaagtggagaatgttgaattcaatagcgatggcgcgctggggatcactgtttatcaccagaaccgcaaaggtagcgcaagttccaccgatttaagcccgcaggccattgcccgtactgtacaggcggcgctggatattgcccgttataccagcccagatccctgtgccggcgtggcagacaaagagctgctggcctttgacgcaccagatctcgacttgttccaccctgcggaagtttccccggatgaagccattgaactggcggcccgcgcagaacaggcggcattgcaggcggacaaacgcatcaccaataccgaaggtggcagctttaacagccactacggtgtcaaagtttttggcaacagccacggcatgttgcagggttactgcagtacgcgtcatagcctctccagctgtgtaattgccgaagaaaatggcgatatggagcgtgattacgcctacaccattggtcgtgcgatgagcgatctgcaaacgccagagtgggttggggccgactgtgctcgccgtactttaagccgtctgagtccgcgtaaactctccaccatgaaagcgccagtcatttttgccaatgaagtggcaaccgggctttttgggcatctggtgggggcgatagcgggtggaagcgtttatcgtaaatctaccttcctgctggatagcctgggtaaacaaattctgccggactggctgaccattgaagagcatccgcatctgctgaaagggctggcgagcacgccattcgacagcgaaggtgtgcgcaccgagcgtcgcgatattattaaagatggcatcctgactcagtggctgctgaccagctacagcgcgcggaaactggggctgaaaagcaccggacatgcgggcggtattcacaactggcggattgccggacaaggtctaagcttcgagcagatgctcaaagagatgggcaccgggctggtggtgacggaattgatgggccagggcgtgagtgccattaccggtgattattcccgtggtgcagcgggcttctgggtagagaatggcgaaattcagtatccggtgagcgaaatcaccatcgcaggtaatttaaaagatatgtggcgcaatattgtcaccgtcggtaacgatattgaaacacgcagtaatatacagtgtggttctgtgctgttgccggagatgaaaatcgccggacagtaaaaaaactggcgcgacctgccgcgctataaactaaaaaattacacaaaatcattcgcactgcatcgagacggaaagtgaatgagggccggggagcgtactcgcagtacgtgacccggtcgaatgagcgtagtcgtcgatgaggcagtgtgaaggatgaagtgtaaataaaaaaggaactattcttgcagtctcctcgttggtattcagttcggcgtcatttgctgctgatctcgaagacaatatggaaaccctcaacgacaatttaaaagtggtcgaaaaagccgataacgcggcgcaagtcaaagacgcgttaacgaagatgcgcgccgcagcgctggatgcgcaaaaagcaacgccgccgaagctcgaagataaaagtccggacagcccggaaatgaaagatttccgccacggtttcgacattctggtcggtcagattgacgacgcgctgaagctggcaaatgaaggtaaagtaaaagaagcgcaggctgctgcagagcaactgaaaacgacccgcaatagttatcacaagaagtatcgttaattcctcatttccctgttgcctgcactcaggtaacagggaacttatcatcgcaaatgatgcaccacctgattgctgctgccgcgccagatcagggaagggtcttttaaatcctgcacaaatttgccgtcgaccagcacgttaatcaaatcaacaacctgcatttgcgcagcgttgagttcgtcgagtttatagcctgtccacacccagatgtctttacccggacactcggcgcggatgcgttgtaccagtttcagaatatccggcacgttttgcggatgcagcggatcgccgccggagagggaaataccctggcgtttgatacgagtgtcattcagatcgttaatgatctggtcttccattgctttggtaaatggctgaccggaatttacccgccatgtgcttttgttatagcaaccggggcattcatgaacacacccggagacaaacagggtgcaacgagtgccggggccgttgacgatgtcgacaggatagtactgatgataattcattatttcgcctggcttatcagtccgcgtgtaggctgcatccggtaatcaatgcctgatgcgacgctgtcgcgtcttatcagacctggagcaattgccaaatgtaggccggataaggcgtttacgccgcatccggcatttgcttagctcagagtgaagattaacctatctgcccattccccaaatgtttaacgcggcgcttaacttcttcctgcttaccagcgttaaacggacgtgcatccgggctacctaaatatccgcacacgcggcgagttacgctcacacgggaggcgtcatggttaccacatttcgggcaagtgaagcctttgctggtgcactcgaactcaccggtaaagccacactcgtagcactcatcaatcggtgtattggtgccgtaatacggtacatgctgatagctgtaatcccagacatcttccagcgccttcaggttgtgctgaatgtttggatactcgccgtagcaaatgaaaccaccgttcgccagcggcgggtaaggcgcttcaaagtcgatcttgtcgtacgggttcaccttcttctccacatcgaggtggaaactgttggtgtagtaacctttatcggtcacgcccggcaccacgccaaactcagcagtatcgagacggcagaagcgatcgcacaggttttcactcggcgtgctgtagagactgaaaccataacccgtttcttctttccactgatccactgcctgacgcagacgttcaacaatggcgatacctttcgcgcgaagctgctcgttgtcgtaaacatgctcgccgccgaacagcgcgttaatggtttcgtggatgccgatgtaacccaggctaatagacgcacgaccgtttttgaagatttcagaaacatcatcgtcagcattgagacgcacgccacaagcaccttccatatagaggatcggggccacgcgcgctttcacgccttcgagacgagcgatacgggtcatcagcgccttacgtgccagcaccagacgttcatccagcagcttccagaaggtggcttcatcgccttttgcttccagagcaatacgcggcaggttcaggctgatcacgccgaggttgttacgaccatcgtggatctgctcgccgttttcattttcccacacgccgaggaagctgcggcagcccatcggagttttaaagctaccggtgactttcactacctgatcgtagttcaggatatccggatacatgcgcttgcttgcgcactccagcgccagctgtttgatgtcgtagttcggatcgccttttttatggttcaggccatcgcgaatcgcaaacaccagtttcgggaacaccgcagttttacggtttttaccgaggcctgcgatacggttacgcaggatgctttcctgaatcaggcggctttcccagctggtgcccaggccaaaaccaaaggttacaaacggcgtctgaccgttggcggtgtgcagggtgtttacttcgtactccagactctggaaggcatcgtagcactctttgatggttcgagagttagcgtagccttcggcgtccgggatgttccactcttctgcggtcttgcgatgtttgttgtagctggcagtgacaaacggtgccagcacttcatcgatacggttaatggtggtgccgccataaatatggctggcaacctgagcaataatctgcgcagttaccgcggttgccgtagagatgctcttcggcggttcaatctcggcgttccccattttaaagccctgggtcagcatgcctttcaggtcgatcaacatgcagttgaacatcgggaagaacggactgtaatcgagatcgtgatagtgaatatcgccacgctcatgtgcctgcaccacgtcacgcggcagcaggtgctgacgtgcatagtgtttagccacgatcccggccagcaggtcgcgctgggttggaatcaccttgctgtctttgttggcgttttcgttgagtaagctggcgttggtctgctcgaccagaccacggatctcctggttcaggcgaccgcgtttttcacgttcaatgtcgcgatcgtgacggtactcgatgtaagcacgagccagttgtttgtatggaccactcatcagctgattttcaactgcggtctggatctcattgatatccacctggttgcggccctgcatctgctcgctgacaaccgcggcaacagtggcgcaataatcggcatcatcgacttccgctgctttagctgcacgcagaatcgcttctttgatgcgctcacttttaaacggcactttgcagccgtctcgtttcatcacatgcggtgtcatgatcgctccatatttttaagaacaggttatccacagaaattgggaaaggcgttttccggttttttcgtttcgttttccggtgctttccgcaatcgccatccgcttatccacaacgccgcacctttttcgtggggagctgtagtagcaattatagtcgattaatacaacatattgggttgggacgcattttaaagtctatatatagtgctttgcatcaaggatgtttgagctttttttgatgtagctcaaagtaaaaagcagagcgtacggatgacgggcgctacagcgatatgtaaattttttaatgaatttgctggttgaaaaatcaacaaaaacaacatactgacagacaaaaccccggaatgaccggcattaccggggcttagggaagatttacttctgtaaccaccagacagcctcaaaaggccgtaaattcatggcacagggttgtggactggcttcttcgtagttatgcatcacaagctgccagttgccgcgcatttgccctgcctgccagggttggatctcacggctaaggttggcaatgaccagcaaggtttgccccttccattcacggcgatagcaccacaatacagggctgtttggcagcagatcctggtaattgccccatgtcaggatggcttcctgcttacgcagtgcgattaacttttggtaggtgtaaaacacgctggaatcatcggccagcgcggcttctacgttgatttgttgatagttatcgcccaggccaatccacggttcgccagccgtaaacccggcattatcgccgttgctccattgcatgggcgtgcgactgttgtcacgggatttactggcgaggattgccaataactcgtcggcatcacgcccatcgttgcgcagctcggcaaacatattgaggctctctacgtcgcgatagtcagtaatgcgcgtgaaatgcgggttggtcatgccaatctcttcgccctggtagatatacggcgttccctgcatgccatgcagcaccatcgccagcatttttgccgcaggcacgcggtattcaccttcatcaccaaagcgagaaacaatgcgcggctgatcgtggttacaccagaacaaggcattccatgctacgttgtgcattccttgttgccagtggcggaacaatgttttcaacgccacaaagtcaggtttagccagcgtccatttttcaccaccgggataatcgaccttcaggtgatgaaaattaaaggtcatgctcaattcactgcctgtcagagccgcgtatcgctggcaatgctcaaggctggtggaggacatttcacctacggtcattaacccgcgtggcgtaaacacatcgcggttcatctcgtgcaaaaactcgtgtgctcgtggcccgtcggtgtagaagcgacgcccgtcgccgtccaggtcttcagggaaacgcgggtctttggagatcagattcaccacatccaggcgcaacccgtcgaccccacgatcggcccagaactcacagacttttttcagctctgcgcgtaccgctggattctcccagttgagatccgcctgttctggtgcaaagagatgcaaatagtactgttcgctttccgcatgccagcgccacgcactaccgccaaatttactacgccagttgttcggtggcgtttctggttctccatcgcgccagatataaaactggcggtaagggctttctttgttcagcgcctcgcgaaaccaggcatgttgggtagaggtatggttaaacaccatatcgagaatgatacgaatcccgcggctttttgcctgcgtcaccagttcgtcaaaatcgtccagcgtgccgtaggtgggatcaatcgccgtatagttcgctacgtcgtaaccgttatcgacctggggagagacataaaagggggttagccagatggcatcaacgcccagtttatgcagatagtccaggtgttggataacgccacgtaaatcgccggtaccgctacccgtggtgtcctgaaaactctttggataaatctggtagataacgccgttttgccaccagtggggaagatgagtcattacgttattcctgcgaatgcgagggggcgcaattgcgccccgaagaaaattaaacaatgtccagcgtgcccaggcggtatttccgctgatagataaagctggtgagtacaatcgggatgatgatggcgatagccattgccagcgcaaacacctgccagtagctcggttgaatgctgagaattcccggcaggccgcctacgccgatgccattcgccataacgccgttcaggccgcatagcaatcctgccagaccagaaccaatcatcgcgcacagcatcgggaagcgatatttcaggttgatgccgtacattgcaggctcagtgaccccaagccaggcggagatagcggcaggcacggagatctcgcgttcattgtgcttgcggctggaaatgataatgcctatcacggcggagccctgagcgatattgctcagcgcaatcagcggccacactggcgtaccacccatgctttgaatcatctgcaaatcaatagcaagcgtggtctggtgtacaccggtgatcaccagcggggcgtacaggaagccaaacaatgctgcgccaatcggagcaaagctgccggtcatcaggtgacgtaccgcaaaggcaacgccatcgccaatcatgcgaccaaacggaccaatcagcgcatgggcgaggaacaccgcgaggatcaggctacagacgggtaccaccaccagatagaggtaatccggcacgatgcgtttaaggcgagtttcaataacgcccagcgccagtccggctaacagtgccgggatcacctgcgcctgatagcctactttggcgatgctgaacatgccaaagtcccacacttccggcagctgctgcccgagcagataagcgttcatcagctgtggagaaaccagtgtcacgccaagcacgataccaaggatcggcgtgccgcccatttttttcaccgcactccagcaaataccgaccggcaggtagaagaagatcgcttcaccgatcaaccacagaaaatcgtagatcgtttgcagggaagggtacatttgcgccagcgtctgaccgttgctcatgggcaaatcgccgatcacattgcgaaaaccgaggatcaaaccgccgctaatcaacgcgggcagcaacgggaagaagatcaccgcgaaatgagagatcaactgctcatgccatttcatattatgccgggcggctttttttacctgctctttatcaacctgcgcctgtccggtactcgcaatcagtgcttgatagtaatcacccacgttggtgccaatcaccacctgaaattgcccggcattggtgaaacagcctttcaccatagggagttgctcaatttctttcggtctggcattggccggttggttgaggacaaagcgtaggcgagtaatacagtggctcaccgtcgcaatattgccgcgcccgccgaccagttcaatcaaccgatcgatatccgtttggtttattttgctcatcataaagccccatggcagatgacatttttggttggctgcagaatatattgcgcggaaaaatttaaaaacgggaacgttcccgaaacgcagcgaagatcacaatttatcgttcaggaaacgatcaggacagggtggcggggatgatgatttgttgcggttcgctgcgcccggttacctgcgcgatcaactggcaagccgcctggcgtccagcttcggcgtaaccgggatctacggttacgatctccggatggaggaatttcattaacggcgtattaccgacgctcgccagttgcaaggtgtcgatgcgttgctcttgcaggtatttacttgcgccaagtgccagcgtgtcggttgcgcacagtaaggcggtagtttcaggcgtaatcacttttgcaacgttctcatagccttgcttcatagcaagccctagcagggcggcaacgggatgcagtttatgcgctttgcagaacgccaggtaggcttcgtgacgtcgcttaccggttgtcacgtcactgtgcggcacgccgagataactgatattacgatgcccctggtcatacagccgttgcatcaggattttgattgccccttcgtcgtcataacagacgctagcaaagccttttgcgtcacgcgccagcagaaccaggctactctgccagtgggctaacatttcttctgttatgccagtaaaaccgaacagcactacgccgtcgatattacgccgtttcagcactcccaaatgttcggcaactaattgcggggaaaactgactttccatcatgattgggtcgtaaccttgttcatagaacgctggcagcatggtttgaacggcgagattttcactcaagctatccagacgggtaacaatgatggcgaccactttatcgctttgcccacgcatagcgcgcgcagagcgggaaggggaaaatccatgctgattcatcactgcttcaacacgctcgcgggtgagctggctcacgccgctttcgttattcagcacccgggaaactgtagatttccccacgccgcttaagcgcgcgatatctttgatggtcagccgattttgcatcctgttgtcctgtaacgtgttgtttaattatttgagcctaacgttacccgtgcattcagcaatgggtaaagtctggtttatcgttggtttagttgtcagcaggtattatatcgccatagatgctacgaatattattggattctccttattatttgcggcgcttttttcacttaccggaggttatatggaacctgatcccacgcctctccctcgacggagattaaaacttttccggtaagcccgtcttttcacggcgttaccggatgcgtaaggccgtgacgttttaacgtccctgctcagctttattaccttcaggtaaggcttcgccacgcctgaagacatttctgtactgtttcagacagtgcggagggactccttatgtttaaagaaatttttacccggctcattcgccatttaccttcccgtctggttcatcgtgatccattgcctggcgcgcagcagacagtgaatacggtggtcccgccgtccttaagtgcgcattgcctgaaaatggcggtgatgcccgaagaagaattgtggaaaacgttcgacacccatccggaagggttaaatcaggcggaagtggaatctgcccgcgaacaacatggtgaaaataaattacccgcacaacaaccgagcccgtggtgggtacatttatgggtctgctatcgcaacccctttaatattttactcaccattctcggcgctatttcttacgccacggaagatttatttgctgcgggcgttatcgcgctaatggtcgctatttctacgttgctgaactttattcaggaagcacgttccactaaagcggcagatgccctgaaagcgatggtcagcaatactgcgacggtgctgcgcgtaattaacgacaaaggcgaaaatggctggctggagatcccgatcgaccagctggtgcccggcgatattataaaactggcggcgggagatatgatcccggcagatttacgtatcttgcaggcgcgggatctgttcgtcgctcaggcgagcttaaccggtgagtctctgcccgtagaaaaagccgctaccactcgccagccggagcacagcaatccgctggagtgcgacacgctgtgttttatgggcaccaccgtggtgagcggcacggcacaagcaatggtgattgctacaggtgccaatacctggtttggtcaactggcggggcgtgttagtgagcaggaaagcgagccgaatgcctttcagcaagggatcagccgcgtcagtatgctgctgattcgctttatgctggtgatggcaccggtggtgctgttaatcaatggttacaccaaaggcgactggtgggaagcggcgctgtttgcgcttagcgtcgcggtaggcctaacgccggaaatgttgccgatgattgttaccagcacgctggcgcgcggcgcagtaaagctgagcaaacagaaagtgatcgtcaaacatctggatgctattcagaactttggcgcaatggatattctgtgcactgataaaaccggcaccctgacgcaggataaaattgtgctggagaatcataccgatatctccggtaaaaccagcgaacgcgtgctgcatagcgcgtggttgaacagtcattatcagaccggacttaaaaacctgctcgatacagcggtgctcgaaggtacggatgaagagagtgcgcgcagcctggccagtcgttggcaaaaaattgatgagattccgtttgatttcgagcgtcgccggatgagcgtggtagtggcagaaaataccgagcaccatcagctggtttgcaaaggtgcattgcaggaaatcctcaatgtgtgtagccaggtgcgtcacaatggcgagattgtgccgctcgatgacatcatgctgcgtaagattaagcgggttactgatacgctgaatcgtcaggggctgcgcgtggttgcggtggcgacgaaatacctgccagcgcgtgaaggagattaccagcgggcggatgaatccgacctgatcctcgaaggatatattgcttttcttgatccgccaaaagagacaaccgctccggcactgaaggcattaaaagcgagtggaattaccgtaaaaatccttactggcgacagtgagttagttgcagcgaaagtgtgccatgaagtggggctggacgcgggagaggtggtcattggtagtgatattgaaacgctatctgacgacgaactggcaaatcttgcacagcgtaccacgctgtttgcccgcctgacgccgatgcataaagaacgcattgtgaccttactgaagcgcgaagggcatgtggttggctttatgggcgatggtattaatgatgcgcccgccttacgcgctgcggatatcggcatttctgtggacggcgcggtagatattgcccgtgaagcggctgatatcatcctgctggaaaaaagcctgatggtgctggaagagggggttattgagggacgtcgcactttcgccaacatgctgaaatacatcaaaatgacggcgagctctaacttcggtaatgtgttcagcgtgctggtagcgagtgctttcttgcccttcctgccgatgttgccgttacacttgcttattcagaacctgctgtacgatgtgagtcaggtggcgatcccgtttgataacgtcgacgacgagcaaattcaaaagccgcagcgttggaatccggcggatctggggcgctttatgatcttcttcggaccgatcagcagcatcttcgatattttgacgttttgcctgatgtggtgggtattccatgccaacacgccggaaacgcaaacgctgttccagagcggatggtttgtggtgggcttactgagccaaacgctgattgtgcatatgatccgcacccgccgtgtgccgtttattcagagctgtgcaagctggccgttaatgatcatgaccgtgatcgtgatgattgtcgggatcgcattgccgtttagtccgctggccagttatctgcaattacaggcgctgccgttaagctatttcccgtggctggttgcgattctggcagggtatatgacattaacccagttggtgaaagggttctatagccgtcgttacggctggcaataaagaataaactgggcacgatagccccgattcagattgtagacaaagtgagttttgttcatgccggatgcggcgtaaatgccttatccggccaacaaattcaataaattgcaggaatcacgtaggcctgataagcgtagcgcatcaggcgattttgcgtttgtcatcagacttaatccgggcatgatagcccggatttccatcaagattagcgacgaacagcgatcgcttcgatctcaatcttcacgtctttcggcagacgggcaacttcaacgcaagaacgtgccgggaaggtggcgttgtgttcggtgaagaaggcttcgtaagtggcgtttacggttgcgaagtcgttcagatcttttacaaacacggtagttttaacgatgtcgcccactttcaggccagcggcttcgacgatcgcttttacgttatccaggctctgacgtgcctgtgcagcgacgtctgccggtacttcgcccgttttcggatttaccgggatctgaccggaggtgatgatcatattgcccagatcaacgccctgtacgtaaggaccgatagctgccggtgcattttccgtcgcgatagttttgctcatgatttctcctttattacagcggtaaaaagtctggctcattatagggagccagacttttattaccaaccgcaattaattggccagcaccacattatgggaaaactctttttcacagtatttgcatttgagcgcgatatcattggcgcgttttcgcacggcaaagctggaactaaccggttcggcatggctgatacagttgctgttcgggcagaccagcacattgtcgatgcgctccggcagacttgggcggcttttacccaccacttcatagttgtcgatacggttaaccgtggcttgcggcgcatacaatgccagttgatctacttgatcttcactcaaaaaggtattttcgattttgatcagatctttgcggcccatctcgccagaaggcaggttcagaccaatggtgatgcgctgatccgtttcggtcagcttgaacagactcaacagcttaaaaccgatctgggcggggatatggtcaattaccgtgccgcgtttaatagcttcaacctgcaatttattatcgtgtgtcatctctatttccccttacagtaccagatcgcgattcagaaccagtgccagtaacgcctggcgagcgaaaatcccgttgcctgcctgctggaagtaccaggcgtgtggcgttttatcaacatccgtcgcaatctcatcaacacgcggcagcggatgcagcactttcatattggctttggcgttgtggagatcgctggcgcgaagaacaaactgcgctttcacgttggcgtactcggacgggtccagacgctctttttgcacgcgggtcatgtacaggatgtctacttccgccatcacttcttcaatagagctgtgcagactccatgcgatccctttttcatcgagcatatccagaatgtattgcggcattgccagcgcgtccggcgcgatgaagtaaaaacggttgccgtcgaacttcgctaacgcctgagtcagggagtgaacggtgcggccatatttcaggtcaccaaccattgcgacgtggagattgtccagacgcccctgggtttcctgaatagtgaataagtccagcaaggtttgcgtcggatgttggttggagccatcaccggcattcagtaccggtacattgccggaaaactcggtggccaggcgcgccgcaccttcctgcggatgacgcatcactatcgcatcgacgtaagtgctgataacgctaatggtatcggccagcgtttcgccctttttacccagacttgtattggcgctgtcggagaagcccaccacgctggcccccaggcggtgcatagatgtttcgaaagagaggcgggtacgggtagaggcttcgaagaaacagctggcaatgactttgtgcttcaacagctctggttgcgggtttgctttcagtttcgccgctgtcgccagcaccagattaaggtcatcgcgactaaggtcgtttatggaaatgatatgtttctgatatagcggattagccatcttttatctcctgacgcctgggcaaaaaaaagcccctcgattgaggggctgggaatgggtgatcaacgggaagaaaaacggcaggccagcgtcttttttcagacgcggtaagacaaaatgtcgaacacactgaaccatacatcctcccggcaaattgtccggcattatactcatcgtcagaagcggcgcaagcatttgatgcaatattttgtcagcgcaaacggtttatttgaattaaaagtcaaggtatatgcatttttatttgatgtgattctgcaggggaactgtccttcggtatcaataattgcagacattccctgctttttcctttttcactttcacgcaatcagatatgcattttattccattcatccgacttatagggcggagtgtgaaagcgaacggctaacactattgcttactgctcagggatgcgcgctatcactttaatttcaaaatcaaagcctgccagccatgtaacacccaccgccgtccagtttggataaggtggggcgctaaatatttcatttttcaccgtcatgatgtcttcaaattggttttctggatcggtatggaagctcgtaacatcaatgatatcgtcaaaagtgcatcccgcagctgccagggtcgcatgcaaattatcaaatgccagtctgacttgttgctgaaaatcgggttctggtgttccgtcctctcgacttcctacttgcccggaaacaaacagcaaatcgccggaacgaatagccgcagaataacgatgctcagcatatagactatgtcggccagcagggaaaacagcggttctttctaccatttggttatcctcaagatttacgacatgaacagaagatttctctttaccgggagccgcttttagcggacgacgtgagtaaacaaaacccagacatcatggataatggctgggcttaattgagcgtagtcggttatgcgccaaacgcgccatcaatggtatgcatcgcgccggtaacaaaactggcttctggccctgctaaccatgcgaccataccagcgacctcttccggttgcccatgtcttttgatagccatcaaactatgcaacatatcgcgcattggcccgttggcgggattagcgtcggtatcaattggccctggctggacgacgttaatggtgatcccacgcggtccaaaatcacgggccagcccgcgcgccatgccttgcagggcagatttgctggcggcataagcagccatgcctgcaacaggcatacgatcgccattcacggagccgatgattaagatgcgcccgccttcgggcatctgccgggcggcttcaacagaggcatgataaggagcatgaatattgattttgaaaaggcgatcaatatcgtcggcatttaattccagggcctcgccaaagacgccaatacctgcatttaccaccaggatatccaatgcgccgctcttacgaacgacatcaatgacagcgtctctgtcagcactatctgtgaatactgctgtcgctccagtctcttgtgccaggcgtttagcggcatctttgctccccgcataggtgaatcgtacattggccccatcggtgacgaaacgacgtacgatagcggcaccgataccacgactgccaccgaggatgagaactgtcttacctgtaaaagcgcccataaggactccttgatttattatgtaacatgcattacaaaactgttttaactttctgtcaacaggttttgtaatggtcactaaaaaacaatctcgcgttccaggtcgtcccagacgtttcgctcctgagcaggcaatctctgcggcaaaagtgctttttcaccaaaaaggtttcgatgctgtcagtgttgctgaagttactgattatcttggtattaaccccccgagcctctacgcggcttttggcagtaaagctgggttatttagccgtgtactcaatgaatacgtcggtacggaagctattccgcttgccgatattcttcgtgatgatcgtccggtaggcgagtgcctggttgaggtattaaaagaagcggcgcgcagatatagccaaaacggcggctgcgctggctgtatggttcttgaaggtattcatagtcatgatccacaagcgcgtgatattgccgttcaatattatcacgccgcagaaacgaccatttatgactacatcgccaggcggcatccacaacgcgcacaatgtgtgactgattttatgagtaccgtgatgtctgggctttctgcgaaggcacgagaggggcactctatagaacaactctgtgcaacagctgcaatggcgggggaagcgataaaaactattcttgaggagtgatgcgggccttgacccgaaaggcgggaaagcgcctgccgataagttgtgataagacaataattcacgcgttaaggctagcggaattgattatcttttcgtataacgatagaaatgaaacgttgttttaattaaggagtggaaaagatgatcatcggaaatattcataatcttcagccgtggctaccccaggagttacgccaggcgattgagcatatcaaagcacacgttacggcagaaacgccaaagggcaagcacgatatcgaaggcaatcgactgttttatcttatcagcgaagatatgaccgagccgtacgaagctcgccgtgcggagtaccatgcccgctatcttgacattcagattgtgttaaaaggtcaggaaggcatgaccttcagcacgcaacctgcaggcgcgccggataccgactggttagctgataaagacatcgcatttttgccggaaggcgttgatgagaaaacagttattctaaatgaaggtgattttgttgtgttttatccgggggaagtgcataaaccgctgtgcgcagtgggcgcgccagcccaggttcgcaaagcagtagtgaagatgctgatggcgtgatgacttttcgccgtaaataactcaaggtttacggcgagtttgtgaaaagagcgttttttgatatttttttgtgagtaaaatttgtaatgcttagacgttcttattcactcaaggagttcgtcatgagcaaaataagtgatttaaattattctcaacacattacattagccgacaattttaaacaaaaaagtgaagttttaaatacctggcgtgttggaatgaatgattttgcccgtattgccggggggcaggataacagaaggaatattctttctcctggagcatttttagagtttttggcaaagatatttaccctgggttatgtggattttagcaaacgctccaacgaagcgggtagaaatatgatggctcatattaagtccagttcttattctaaagatactaatggcaatgaaaaaatgaagttttacatgaataatcctgtaggggaacgagcggatagtcccaaggtgattatagaaattagtctttccactatcactactatggggactcgtcaaggacatacagccattatatttccacaacctgatggtagcactaaccgttatgaagggaagtcctttgaaagaaaagatgagagtagtttacacctgattactaacaaggttctggcgtgttaccaaagtgaagctaacaagaaaatagcgcgtctattaaataataatcaggagttaaataatctacagaaattaaataatctacagaagttaaataatctactgaagttaaataatatacaggggttaaataatcctcaggagttaaataatccgcagaatttaaatgattctcaggagttaaataacagccaggaattaaatagtccacaggagttaaatgatccgcaggagttaaataattctcaggacttaaataactctaaggtgagttgtacagttagtgttgattctacgattacgggtttattaaaagaaccattgaataatgcattattagcaataaggaacgaacatctgctattaatgcctcatgtatgtgatgaaagcattagttacttactgggcgaaaaaggtatacttgaagaaatagataagctctacgcattaaatgatcacggaattgataatgacaaagtaggtaacaatgaaattaatgacatcaaagttaacctgtctcatattcttattgattccttagatgatgcaaaggttaaccttacaccggtcatcgatagcattctggagacttttagtaaatccccatatattaatgatgtaagaatactggattggtgttttaataaaagcatgcaatattttgatgatactaaaaagataaagcatgcatgctccgtaataaatcatattaatcttcgcagcgatcagtctaaaatagctgagacattatttttcaatctcgataaagaaccctataaaaatagccctgaattacaggggttgatttggaataagttggttgtatatgtcaatgaatttaacttaagtaatcgagaaaaaacaaatttaatacaaaggctatttgataatgttgagtctatatttaatgaagtacctgtcagcattttagtgaatgatatttttatgaatgatttctttatgaaaaatcctgagatgattaattggtacttccctcagttacttaagagttatgagggtgaaaagatttattttgataatttaaaatatgatttaaatgataatgataaggaatctaataaagaaattttgaagaatcaaccagataatgttatcaaagaaaaactgaataatgaatacaaacttagatttagaatgatgcaaactatcttgcaaagcagagttaatgtattaccatatattaatgaacagcgtttaaataaactaaatccaccggaaaatttacgtatagcaatagaacactttgggtggaagaatagacctatcactgcataaaataatgtgatgccgggatggtttgtatttcccggcatctttatagcgatagcaattatttactgagcgtcgcgaccatcaccgctttgatagtatgcatacggttttccgcctgatcaaaaacaatgctggcggcagattcgaagacctcatcagtgacttccataccgccatgtaggccaaattcttccgccattttcttgccaagcgtcgtttggtcgtcatgaaacgcgggcaggcagtggaggaatttgacctccgggttaccggtcaactgcatcatcttgctgttcacctgatattcacgcagcaatgcaatccgttccgcccatttctcttttgcttcccccatgctcacccacacatcggtatagataaagtcagcaccttcaactcccttcgcgacatcttcagtcagcgtaatattcccaccattttgctgtgccagggcgcggcattccgtaaccagcgcagcttccggccagcacgcttgtggcgcgaccagacgcaaatccagaccggtaagcgccgcagcttcgagcatgctattgcccatgttgttacgcgcgtcacctgcatagaccagcgtcatttcgttgaacgctttgccgggcaaatgctcctgcatggtgagaagatccgccagcagctgcgtgggatggaactcattggtcaggccattccataccggcacgctagcgtattccgccagtgtttcgacaatctcctgaccatagccgcgatactgaataccgtcatacatgcgaccaagcacgcgggcagtgtctttaatgctctctttatgaccaatctggctgccgcttgggccgagataagtaacgcgagcaccctggtcatatgcggcaacttcgaaagagcatcgggtacgagtgctgtctttttcgaagatgagcgcgatgtttttaccagtgagtttggcttcttctttaccgcttttcttatcggctttcagcttcgcggctaactgcagcaggctgttgagttcagctggcgtgaaatcgagtaatttcaggaaatgcttatgataaaacccggacatagatccctcctgtggctaacgcctcaatgaattaaaattcaatttatatggatgattattcatttgcaagtctaaagcataaatctttgtcacaaaggtggaggcaatgtcagtggtgtgtgacaataagagtatcggcaggacattaagaggaatgagccatggcaaacccggaacaactggaagaacagcgtgaagaaacacgtttgattattgaagaattactggaagatggcagcgatccggacgcgctgtacaccatcgaacaccatctttccgcagacgatctggaaaccctggaaaaagcagcagttgaagcgtttaaactcggttacgaagtgaccgatccagaagagctggaagttgaagatggtgatatcgtgatttgctgcgacatcctcagcgagtgcgcgttgaatgccgatctgatcgatgcccaggttgaacaactgatgacgctggcagagaaatttgacgttgagtacgacggatggggcacttactttgaagatcctaacggcgaagatggcgacgatgaagattttgtcgatgaagacgatgacggagttcgccactaattaagcgtagcgcatcaggcccaggtagttcctgcaacctggtgaatttgtagcccggataaggcattcatgtcacatccggcataaacaaaacgtacgttgttaatgttcgaatgcccgcgagttgaacacgcgggcatttttttagagttcgcgcaacatccgcacttcacaatcgacatggcccgtgcagccaagcgcatagtcgatatgctcaaagcccaaatgctcataaagcgcaatggcttcctttaaaaaagcggtcgtttccagatagcagcgtttgaaacccatctctcgcgcctgctccatcgccattaaggccagtttttttgccagccctttgccgcggatagccggaagaaaatacatcttttgcagttcgcaaatatcgctctcactcccggttaatggcgctatcccaccgccgccgaccacttcaccctcgtactcaacgacccaatatgcatggccaggctgactatatacttgatacagctcgtcaagattcggatcggcgacggtgtagcctttatcagcggtaagaccgtattcggcggatacctgacgaatgacgcgggcgatagcaggattatcctgcagcgtcaggcgacgcattacaggactttgcggcgcaatgttattcatagtttaacccaataaaaataaagtaattatacatttgtttaataccactctcttcttacgtacgcaagcgacttataaagtaataaagtttttgccagcctattactgataagagtattgtaacgtggcagaacattttactgtctgtatatataagttatatcaatggattttttaattcagggaatttttatggctcaagttattaatgaaatggatgttccgtcccatagctttgtttttcatggtacaggtgagaggtattttcttatttgtgtggtgaatgtgttgttaacgattataacgctaggtatctatttaccatgggcattaatgaaatgtaagcgttatctttatgctaatatggaagttaacggacaacgattttcttatggaattaccggtgggaatgtttttgttagttgtcttttttttgtttttttctatttcgcaatcttaatgacagtgagtgcagatatgccgcttgttggttgtgttttgactttgttactgttggttttgcttatatttatggcagcaaaaggactgcgtcatcaggccttaatgaccagtctcaacggcgtaagatttagttttaattgctctatgaaagggttctggtgggtgacctttttcttgccgattttaatggccattgggatggggactgttttctttatcagcacaaagatgctacctgccaatagtagtagtagtgttattatatccatggttctgatggcaatagttggtattgtttccattggtatttttaatggtactttatatagtctggtaatgagttttctctggagtaataccagtttcggtatacatcgtttcaaggtgaaattagatactacgtattgtataaaatatgccattctcgcatttttagctttattgccttttctcgctgttgctggttatattatcttcgatcaaatattaaatgcgtatgatagttctgtatatgcaaatgatgacattgagaatttacagcaatttatggaaatgcaacgtaaaatgataatcgcgcagttaatctattattttgggattgctgttagcacaagttatttaacggtgtctttgcgaaaccattttatgagcaacctgagtctgaatgatgggcgtattcgttttcgcttaactttaacgtaccacggtatgctttatcgcatgtgtgcgttggtggtgatatccgggattacgggcggtctggcttatccactgctgaaaatatggatgattgactggcaggcaaaaaatacgtatttgctgggcgatttggatgaccttcctttaatcaataaagaagaacaaccagataaaggcttcttagccagtattagtcggggagttatgccttctttaccatttctgtaagagataaaaaaggccggagcatgctccggccttcgttttcatcactgtgttttgattacagcgcggcgataacagcctgctgttcaatcagtttcgctttcgcttccgcatagccttccagcttctcacgctctttcgcgatgaccgcttccggtgcgcgggcgacaaagccttcgttcgccagtttgttctcgatacggctgatttcaccttcaatcttcgccacttctttcgccagacgcgccagctcatcttctttgttgatgaggccagccatcgggatcagcagctctgcaccgtcgatgatcttcgtaacggaaaccggacctttgtcatcggcaggcagcacggtgatactttccagacgcgccagggtttgcaggaagccacggttttcatttacgcgacgttctgcatccgcgctgcaaccacgcagcagcagctccagcggtttgcccggcgcgatgttcatttctgcacggatgttacgtaccgcaacgatcgcctgtttcagccattcggtgtcggccagtgcggcttcatcaacctgagatgcatcgtactgcgggaacggctgcagcatgatggtgtcggcagtgataccgcaaagtactttcacacgctgccagatggtttcggtgatgaacggaatgatcggatgcgcgaggcgcagcagaccttccagtacagtcaccagcgtatggcgagtaccgcgcagttctgcttcggtgccaccgttcattaccggcttggtcagctcgagataccagtcacagaactggttccaggtgaactcatacagaatgcctgcggcgatatcgaagcggaagctgtccagcgcttcgcggtacgctttgatggtctggttgaactccgccagaatccagcggtccgccaggctcagcgtcatttcgccgccgttgaagccgcaatcctgaccttctgtgttcatcagcacaaagcggctggcgttccacagcttgttacagaagttacggtaaccttccagacgcttcatatcccagttgatgtcacgaccggtagacgccagcgccgccagggtgaagcgcagcgcgtcagtaccgtgcggctcaataccgttcgggaactgcttctcggtgcgcttacggattttgtccgccagctgcggctgcatcatattgccggtacgtttttccagcagttctggcaggctaataccgtcaaccatatccagtgggtcgataacgttacccttggatttggacatcttctggccttcgtcatcacgaatcaggccggtcatgtaaacggtgtggaacggcacctgcggtttgccattttcatctttgatgaagtgcatggtcatcatgatcatgcgggcaatccagaagaaaatgatgtcgaaaccagataccatcacgctggttgggtggaactgacgcagggcgtcggtattttccggccagccaagggtagagaaggtccacagcgcagaagagaaccaggtatcgagaacgtcttcgtcctgacgcaggacaacatcagcaccgaggttattttctttacgcacttcgtcttcgttgcggccaacataaacgttacccgcttcgtcataccatgccgggatacggtgaccccaccacaactgacgagagatacaccagtcctgaatatcgcgcatccaggagaagtacatgttttcgtactgcttcggtacgaactgaatgtcgccgttctcaaccgcttcaaccgccggtttcgccaggacatcggcacgcacgtaccactggtcggtcagcattggttcgataactacgccgccacggtcgccgtaaggaacggtcaggtcgtgcggtttaatttcttccagcaggccaagcgcgtcaactgcggcaacgactgctttacgtgcagcaaaacgctccagtttctggaactctgcagggatttcgctggaataaacgtcagattcgttacctttggtatcgaacacctgggcgctttcacggatatcgccgtcaaaggtcaggatgttgatcatcggcagggcgtgacgtttacccacttcatagtcgttaaagtcgtgcgccggagtgattttcacgcagccggtgcctttttccatgtcggcgtgttcgtcgccaacgatcggaatacgacggttaaccagcggcagaatgacatatttgccaatcagatctttgtaacgcggatcttccgggttaacggctacgccagtatcgcccagcagggtttctggacgggtagtcgcgaccaccagataatctttaccgtctgcggttttcgcaccgtcagccagcggatagcggatgtgccacatgctacctttgctttcgcggttttcgacttccaggtcagagatagcggtgcgcagtttcggatcccagtttaccaggcgtttgccacggtaaatcaggtcttctttatacagacgaacgaaaacttctttcaccgcattggacaggccttcgtccatggtgaagcgttcacgctcccagtcgacggagttgccgagacggcgcatctgacgggtaatggtgccgccagattccgctttccattcccagattttgtcgatgaaagcttcgcggccgtagtcgtgacgggttttaccttcttctgcggcaatcttgcgctcaacgaccatctgggtagcgatcccggcgtggtcagtaccgacctgccacagggtgtttttgccctgcatgcgctgatagcggatcatggtatccatgatggtttgctggaaggcgtgacccatatgcaaactgccggtgacgttcggcggcgggatcatgatgcagaaactttcctggctttcatcgccattaggcttaaagtagccctgcttttcccagtgctcgtaaagcggctgttcgatatcttgtgggttatatgtcttttccattatttccaggttgccgtattcaggttgaaaccagccacgcggtaggctttatagcgttcgcgcgccagttgtttcagagaatcttcataaggaacgaagtctaccacttctgtgaaagcggtggcaaaatctgcaaagcttgttcgcagactaatcaatatatcgcgccggctgctgctacgcttttgcggccaggcgatctccaccggtgcaccgccgcgcggtccttctcccgctaaattatgcggaacaaagctttctgccggacgcgcccacagggcttcatccagccggtaagcctgcttttcatcttcacaggcgatgagcacgcgcttaccgctgcgccaacgttctgcggcaatttcacacaccagttgctcaacggcgcttaagccatcgacggtggtgtcattgtccagaaggtagaacgtcgcgtttttcataaatggggcttcttgtggtggatttaaatacgcatcaggtatacaccgcagcgcctgatgcgacgctgttgtgtcttatcaggcctacgagttcagtgctgtgtaggtcggataaggcgttcacgccgcatccggcaataacagccttgcctgacgcaattactcttcgccgttaaacccagcgcggtttaacaggaactgtgccagcaacgctaccggacgaccggtggcgccttttgctttaccagaacgccaggcggtaccggcgatatccaggtgcgcccagttgtacttacgggtaaagcgactcaggaagcaacctgcggtaatcgccccaccaggacgaccgccaatgttcgccatatcggcaaaattggactccagttgttcctgatactcgtcacccagcggtaagcgccatgcgcggtcaccggattgttcagacgcggcaatcagttcatgggccagcggattatggttcgccatcagaccagtaatatgatgacccagcgcgatcacgcaggcaccggtcagcgtcgccacgtcaatcaccgcttccggctcaaaacgctcaacgtaagttaacacgtcgcacagtaccaggcggccttcagcgtcggtgttcagcacttcaacggtttgaccggacatggtggttaacacatcgcccggacgataggctcgtccgccaggcatgttttcgcagcctgccaacacgccgataacgttaatcggcagttgtagctccgcgaccatccgcatcacgccgtaaaccgctgccgcaccgcacatatcgtacttcatctcatccatgccttcactaggcttgatgctgataccgccggagtcgaaggttaaacctttacccaccagcacgattgggcgtgcatcttcgctcgcgttgcctttgtactcaatcacgctcatcaggctttcgttttggctaccctgaccgaccgccagataggaatgcatccccagctctttcatctgctgttcgccgataacgcgggtgatgacattcttgctgtagctgtcagccagctggcgcgcttgactagcgaggtaagcggcgttacagatattcggcggcatattgccgagatcttttgctgctttaatcccggcggcaatcgccagaccgtgctggatcgcgcgctcaccgctggtcagttcacggcgggtcggcacgttgaacaccatcttacgcagcggacgacgcggttcgctcttgttcgttttcagctgatcgaaactgtagagcgtctcttttgccgtctcgacagcctgacgcactttccagtagttgttacggcctttaacgtgcagctcagtcagaaagcagaccgcttccatactgccagtatcattcagcgtattaatggttttctgaataacctgcttgtactgacgctcatccagctcacgttctttgccgcaaccaataaggagaattcgctcggaaagtacattcggaacatggtgcagcaacaatgtctgccccggttttccttccagttcgccccgacgtagcagggcgctgatgtacccatcgctgattttatcgagctgttctgcaatcggagaaaggcgacgtggttcgaagacgcccacgacgatgcaggaactccgctgtttctccgggctaccgctttttacactaaactccatgcactacgctcctgaatcttaaagacaacggcggtggctacagatagaattgcaagctttcgtaactcatgtccgctgttgcgatgacttcgtgttaatcttaacgttattacggcattggcacgtcagaacaaaatctgagaggtgaatccgttgagtataattatcttagcgacgatttcgacgactcaagagaataaatgacgtttaagccatgaaacaagctaaaatcctgcaaaagacgagtttttacgggcgtatttaaagtgataatcataagatatctggtgcgggagacgctcaaaagccagctggcgatactcttcatcttgcttttgatcttcttctgtcaaaagttagtgaggatcctcggcgcagcggttgacggcgatattccggcgaatctggtgctctcccttctcgggttgggcgtgccggaaatggcgcagcttatcctgccattaagcctgttcctcgggctgctgatgacgctgggcaaactgtataccgaaagtgaaattacggtaatgcatgcctgcggcctgagcaaagcggttctggtgaaagcggcaatgatccttgcggtattcacggcaatcgtagcggcggttaacgtgatgtgggcgggaccgtggagtagccgtcatcaggatgaagtgttagcagaagcgaaagcgaaccctggcatggcggcgctggcgcaagggcaattccagcaagcgactaatggcagcagcgtgctgttcatcgaaagcgttgacggcagcgatttcaaagatgtgttcctcgcgcaaattcgaccaaaaggtaatgcacgtccttctgtggtggtggccgattccggacatttaacccagctgcgcgacggctcccaggtcgtcactctcaaccagggaacgcgcttcgaaggcactgcattgttacgtgatttccgcattacggacttccaggattatcaggcgatcattggtcaccaggcggtggcgctcgacccgaacgataccgaccagatggacatgcgcacattgtggaacactgacaccgatcgtgctcgcgcagaactgaactggcgtatcacgttggtattcaccgtgtttatgatggcacttatggtcgtaccgctgagcgtggttaacccacgtcagggacgcgtactgagcatgctgccagccatgctgctgtatctacttttcttcctgatccagacctccctgaaaagcaacggcggtaaaggtaagctggacccgacgctgtggatgtggaccgttaacctgatttatctggctttagcgattgttctcaacctttgggacaccgtgccggtccgccgcctgcgcgccagttttagccgtaaaggagcggtgtgatgcaaccttttggcgtacttgaccgctatatcggtaaaactattttcaccaccatcatgatgacactgttcatgctggtgagcctgagcggcattatcaagtttgtcgatcagctgaaaaaagccgggcaggggagttacgacgcgttaggcgcaggaatgtataccttgctgagcgtgccgaaagatgtgcagatcttcttcccgatggcggctctgcttggggcgttgcttggtcttgggatgctggcgcagcgcagcgaactggtggtgatgcaggcttctggttttacccgtatgcaggtggcgctgagcgtgatgaaaaccgccattccgctggtcttgctgacgatggcgattggcgaatgggtcgcgccgcagggcgagcagatggcgcgtaactaccgtgcgcaggcgatgtacggcggcagcttgctctctacccagcaaggcttatgggcgaaagatggcaacaacttcgtctacattgagcgggttaaaggtgacgaagagttaggtggcatcagcatttatgcctttaacgagaatcgtcgtctgcaatccgtacgctatgccgctactgcgaagtttgacccggaacataaagtctggcgtctgagccaggttgatgaatctgatctgaccaatccgaaacagattaccggtagccagacggtgagcggcacctggaaaaccaacctcacgccggacaaactgggcgtggtggcgctggacccggatgcactctctatcagcggtttgcacaactatgtgaagtatctgaagagcagcggtcaggatgccggacgttatcagctcaacatgtggagcaaaatcttccagccgctatctgtggcggtgatgatgctgatggcgctgagcttcatctttggcccactgcgtagcgtaccgatgggcgtgcgtgtggtcaccggtatcagtttcggttttgtcttctacgtactggaccagatcttcggcccgctgacgttggtttatggcatcccgccgatcatcggcgcactgttgccaagcgccagcttcttcttaatcagcctgtggctgttaatgagaaaaagctaaccgaatgaacgaataaagggagcgaaagctccctttattattgttagcaaagtgtgcttcgttcattcctgaaaaataattaaaattcaatatattgcagtggggtgggcatgataagacgcgccagcgtcgcatcaggcaaagacaaatctcgcctgacttaccttcttctcccccccagcaaactccccaacatcccgcgtacaatctgattcgtcacttggcgagcggcgcttttggccattgtttgcaccacaccatctttcttcccgccgcgtggtccggtagtgccgaacaaaatatccttcaatccaccaagaatgccgtcatccaccgctacctctttccctttcgcgggaggattattttgctgctcggtactggcctgaaagcctttttgcaacatctcataggcggattcccggtccacctcatcctcatatttgccatacaccggagagtgattaatcaagccattacgctcatcttccgtcaccggccccatccggctacaaggcgcgatcaccatcgcacgctccaccacagaagggcttcctttcgcatccagaaaagagatcaacgcctcgccggtgcccagttcctgaatcgccttttcggtatcaaacgccggattggcccgcatggtttgcgccgctgccttcactgctttctgatcttttggcgtaaaagcccgcaaagcatgttgaacgcgattaccgagctgcccgagcacattatccggaatatcagacgggttttggctaacgaaccagacgcccacgcctttactgcgaataagccttatcacctgctcaatcttatccagcagtacctgcggggcatcgttaaacagcagatgtgcctcgtcgaagaaaaacaccagttttggtttctccagatcgcccgcttccggcaattgttcatacaactcactaagcatccacagcaggctggcggcgtacagtttcggcatctgataaagtttctcggcgctgaggatattgataacgcctttaccgttggcatcggtgcgcatccagtctttgatatccagcatcggctcaccaaagaagtgtgctgcgccttgctgttccaggctcaacagcccgcgctggatggcaccaacgcttgcgctactgatattaccgtactgattctggaaggatttggcgttatcgccgatgtactgggtaattgcccgcagatctttaaagtcgagcagtaacagcccctgatcgtcagcaatgcggaagatgatattcagcacgccagattgcacatcgttgagattcaacagtcgtgccagcaacagcggccccagatcgctaaccgtcgcccgcaccggatggcctttctcgccaaagatatcccacaccaccaccggattggcatgcggttgccagtcattgacgccgatatttttaagccttgcgagcagtttttcgctcaccgttcctgcctgcgcgacgccggtcagatcgcctttcacatcagccataaacaccggcacgccgatttcgctcaaactctccgccagtttttgcagcgtaacggttttacccgtccccgttgcgccggtaatcagcccatgacggttagccattcccggcagtaaaaacagttctgtgtccggcgtgcgggcaattaacaggggttcactcatgagatatcctccagtttcctgcctggagtataggcaacgtccggcaaagagaatacgtgtaatgaagagaaaataacttaaagcgtgttgccgtgataaatctgatacccgaggtcaacagtgttgtggttgtgatcgttatttttaattttgctcagcaacatttgggcggccatccgaccaatatcaaaacggggagtaattacgctggcgaggcttgggatcatttgcctgccaatctccagcccatgaaaacccgcaatggaaatttgttctggcacggcgaggtttcgctcgcggcacagcagaagcgcacccatcgcaatatcgtcattggtgcaaaatacaccgtctaaatccgggtttgcgctaagggcatcacgcattaactgcattcctaaatgaatggaactgatggcgcgtggattcatgcgtaatggggaaagattatgcagcatcatcgcatcgcaatacccctgataacgctgttcatcgcgggtgtcatctttggaaccgagatacagaattttgtgcctgactcgcttctccagcatggtacacaccatgtcaaaagcggcctgccgattatcaaaaccgacctccatatccagccgttctccctgtacatccatcaattccacgaccggaatggtggcactacgcagaaatttcaccgtcctgatggtgtgatatttttcgctaagtataatcccgtcaatgttataagagagcaggttaatcacgctctcttcttcggaatcgcgatcgtaattgtaattagcaataagggtctgataattatgctcagaggtgacggattctattcccgcgagaatgtcagcgaagagttgattttgaaaactcggaatcaagataccgagggtataactttgtgcattcaacaacatgccgggagcgcgattagggatataattgatctcttccataattttggcgatgcgctcgcctgtttcctttgccacctttttcgggctgcggatataacgactcacggtcatttttgttacgccagccagcgtagcgatatcctgtaaagaaattctgtgattgcgcataacttctcccaacgtcgggggaatcttcaatcttcccccgaaactacatcacaatattttattctttcagtgcaatacggcgttaatggctaacacgcccagcaaacccataacagaaataagggtttccatcaccgtccaggtacgcaacgtttcaccaaccgtcagattaaaataccctttaaatagccagaagccagggtcgtttacgtgactcgcgatcacgctgcccgcaccggttgccagtaccattaaagcgggatcggcatgggtaacgttgataatcggcaacaccacacccgcggtggtaatggccgcgacggtggcagagcccagagcgatacgcaacagcgccgcaacagtccagcacatcaataacgggctaagtgtagttccggtcattaagtgactaatatagtgcccgacaccgctatctactaatacctgcttaaacgcgccgccgccagcgataataaacacaatcatcgcgatagcgcctatagaatccccaatgatatccatgatttgctcgatggtgcgtccattacgtcggcccagtgtgaaaatcgcaataacaatggcaataaacagcgcaacggcagggttaccgacaaattcaaagaagaggcgcacggtgttagttttcggtaacgtaatttcacaaacggcggcgatagccatcaggatgaccgggatcacggcagcgaaaatactgttccagaaggagggcatctcctcttcgctaaacagatgaggattaaataagccttccggtggtgctttctcaaagcgagttagcagtttagaaaacagcggtcctgcgacaataactgtcggaatggtaatgataaatccatacagtaaagtcgttccgagattagcctcaaagatagtcgcgatggcagtaggccctggatgtggcggcagaaaacagtgggttacagagagcgctgctaccattggtacgccaacatacaacaggggtaatccactacttgctacgatggtaaataccaacggcaacagcaggacaaaacccacttcaaaaaacatggcgaggcccacaaccagaccggtgatcactagcgcccattgcacgcgttttttaccaaaagtagcaatcagcgtagtggcgatacgttgtgccgcacccgtatcagaaatcagcttgcctaacatggccccgaaaccgaggatcattgccagcccgccgagcgtgctgccgataccattttgtatagagtgcaggacggcctgtgcatccatcccttcggcaaatccgacgacggcagctaccagaacgagggcaataaagccgttaactttaaagccgatcatcaggataagaagcagcgcgacgcctgccgcaataatgattaatggcatagtctttatctcttattagtgccagaaaagcagcgctttcgcgctgcacgtaggggggctgttaaacagccactaacatgccgccatcaacaaacaacaggtggccgtttacgaaatcagaggctttactagaaaggaacaccgcagcaccaatcagttcctgcggatctccccagcgtgcggcgggggtccgtttgcacaaccaggcggtgaaggcttcgtcctcaaccagtgctttagtcatttctgttttgaaatagcccggcgcaataccgttgacctgaatattgtggcgcgccagctcgacgcacatgccgcgggtgagcatttttaccgcccctttgcttgcggcataaggggtgatggtgtcacgtcccagttcgctttgcatgctgcaaatattaataactttacctgccttgcgttcaaccatgtgacgagttaccgcttggcttaccaggaacacggcggtctggtttactgcgatcacatcattccactcttgttcagggaactcagtaaaaggatgacggcgctggataccggcgttattcaccagcacatcaatggggccgatgtccttttcgatatgttcaacggcggcatcaatttcatgtttatgagtaacattaaaaggtgcggcaacggcctgaataccctcctggtggagtttttctacagcaagttctgcgcgttcggcagtaatatcattaataattatttgtgcgccatatttacccaggccggttgccagtaaaaagccaatgccctgtgcactaccggtaatcaagatattttttcctgccagactaaatagatcgttcattgtattattcctttatttatctcttagaaaacaagctggacttttgctgcctgggttttatcaccggcgaaacgtagcgcctcttccaggtcagtgaagggatattcagcactcagtaaaggcagtggattgataacgccattcgccagccaactcactgcggtattaaattcgctggtaaaacggaaagagcctctgagactaatctccttaccaatcaacgtcatcattgggaattctgccatcgcgcctcccatacctacctgcaccattacgccgcgtgcacgagtgacctccagacaggtattcacactactaggatgaccggacacttcaaagctgacatcgaaatagcctttttccgctttccagtgatccatgtcgtcgttttgtgggtttacgagcacatccgcccccatctctttgcccaggctaagggaacggggactcacatcagcacagacaatttccgcggcccccagtgttttcactgcactgacaatcaggcagccaatgggtccaacaccggaaataaatactcgcttgccctgtaactcgccggcctgatgtgcggcatgaatcgcgacggctaaaggttcggcaaaagccataaccttttcgtcagctttggccggataagggacacattggctcgtttcgaccattttataacgggtaaaaccaccatcaacatgagggaaatacatggcactgccaaaaaaacgcatatctgtacactgattctcgttatgttcaatgcagtatttgcagtgaccgcacggtttagacggattaatggctaccgtttgcccttcatgtaattcactactgtcgctatgaataactttaccgataacttcatgacctaacaccatcggtgcctttatcatgaaattacctacttttccttcctgataataatgtaaatcggaaccgcaaattccacctcgggttatttgtactaatgttccattattattccaatctatcgtctgctcggtaacggcaacagttttcttgcccgcaacaacgcaggactgtgttttcacttgcataaattcctcactggtcaggtagacacctcggaagcatttaagcggttttaactgtcattatttgtgatgaagatcacgtcagaaaattgttacattactatgttacgcataacgtgatgtgccttgtaattcttatcagtagaaataaaaaaacgtgaaattattatgccgccaggcgtagtatcgcagcaggtaagatgattcaggagattttaaatggcgggtgaaagctttattttgatgggcgttagtgggagtggtaaaacattaattggtagcaaggttgccgcgttattatctgctaaatttattgatggtgacgatcttcatccagccaaaaatatagataaaatgagccagggtattccattatctgatgaagatcgacttccctggctggaacgcttaaatgatgctagttacagtctttataaaaagaatgaaacaggatttattgtctgtagtagtttaaaaaaacagtatcgtgatattttacgcaagggtagcccccatgttcatttcctctggttagatggcgactatgaaactattctcgcgcgaatgcagcgtcgggctgggcattttatgccggtagcgttactaaaaagtcagtttgaggcactggagcgtccacaagcagatgaacaggatattgtgcgcattgatatcaaccatgatattgccaatgtcaccgaacaatgtcggcaggctgtgctggcgatacgacaaaacagaatatgtgcgaaagagggcagcgccagtgatcagcgctgcgaatgattttcaaaaatcggctttcaacaccacgcggtaacgcgccttaccgtcgcgcacatgctggatggcgtcgttaattttgctcatcgggaacagttcggtggtcggcgcaaccttgctgcgggcggcaaaacgcatcagcttacgcagctcataaggcgtgccggtagcagaaccagagacgctgcgatcgcccgcaattaacgtaaaggccggaacagacagcggcgtgagaaccgcaccgaccgtatggaaattaccgccataggtcagcgcctcaaaatagggctgccagtcgaggctgacgttgacggtgttgataatgagatcaaactgccccgccagtgctttcagtgcctgcggatcgcggctattcaccactttatcggcacccatcgccagcacttcctgctctttcgccggattagaactaaaggctgtcacctcgcatcccattgcgtgcagaagttttatagcgatatgccccagcccgccaataccaattaccccaacgcggctggtagcagtgatatggtgcatcaacagtggtttaaagaccgtgataccgccgcacaacagcggcccggcggactcgatatcaatattttctggcagtggaatcacccattgccagtccgcacgcaacttctcggcaaagccaccgcgattcataatcgtcggcaccgcaccttgctcgcagttgatctgattaccgctaatacaggcgtcgcagtgaccacagctacgcgccgtccagccaatcccgacacgctgaccgacctgcaaacctttatcctgcgcggcgctcccgagtgccaccacgcgcccaatcacctcatgcccggcaaccagcggatattgactaaatccccattcgttatcgatcatgctcagatcggaatggcagatcccgcagtaatccacctgcacttcaacatcttgtggcctcagctcaccgggatcgtactcataaacttccagttcgccgcccgcttcttttgcggcatagctttttatcatgctcattttttggtccttctctggtgttgtttgggaagtgtagagcatggcagggcggggtgcctggagtgtgacaaaggttacacatcgctgtatgcaatgctgaaaatttcagcacttagcgaggtgcgagcaagctggcgcttgcatggtggcgtgcgacaggtataatccacaacgttttccgcatacctcttcagtgccgaagtggcgaaatcggtagacgcagttgattcaaaatcaaccgtagaaatacgtgccggttcgagtccggccttcggcaccaaaagtatgtaaatagacctcaactgaggtctttttttatgcctgaaatccagtgtttatctatctttcccgctatattaactctctcaaggtcaaccgatatcaacgtacatctaccaacatatgttggtacagatgatggtatttccggttcgataatgcttgtaccaacagggagggaatacgagaaatcacaggacattgctaatgctggtacgcaatattacctgaagctaaaaacctgcacgttagccctttgtaggccagataagacgcgtcagcgtcgcatctggcataaacaaagcgcactttgctggtctgttcccctcaccctaaccctctccccggaggggcgaggggactgtccgggcacatttttagactttgtcatcagtctgagcctgccattggcaggctctggtgtccttttacgctaccatgctaataatcagcacaataatcagcccaaccacggagttgaccagctccagcagaccccaggttttcaacgtgtcttttacactcaggtcaaagtaacctttgaacaaccagaaagatgcatcgttaatgtgggtgagggtgttggaacccgcagccgtcgccagtaccagcagcgccggattcacgccaaccagctgaccagttgctggatctaggattgcagcactgataatcccggcggcggtcatcgcgctaacgacaccctgacccgtcgccagacgaattagcacagtgatcagccatgccatgatgtaggggctgatattgccgtgggacatcaacatgccgatggtgtcgccaatgccggtgtcgatgatggtctgcttcagcacgccacccgcaccgatgatcagaatcaccattgcaatactcttcaccgcgctttcaaaagcgttcatcacccactgcatgtcatgaccacgtgcggtgccaaagagtacgaatgcaaccaccatcgcaataaacattgcaatcgggctggaaccgataaagttaaccacttcccaggcaggggtatcttttaccagccagatattggcgatggtggtagagatcataatgatcgccgggatcagcggcaccagaatgctaacgccgaaagagggcagattattcatatctaccggttgatctgctttcaggaaacttggcgttgggcgctcaagattgccgaggaacttcggcaggatcagacctgcgcagattacacttgggatcgtcaccagtacgccatagatataaaccatccccatatccgcgccataagcattcaccagcgccaccggacccggctgcggtgggaacagactatgtgcggtagtggcagctgctactgccgggatcgccagtttcaggaacggaattttagcttcggcggcaataacaataaccagcggcgctaacatgataaaggccacttcatagaacatcgccagaccaaaaatcaggccgatgataatcacgctcagctgtacatagcgcagaccgagacgcgccagcagcgtatgcgctatctggtgagccgcgccggagtcgaccatcaatttaccgatgaccgcaccgaacaccacgatgatagccagttcccccagcgtgttgccgaagcccgctttcatagtgtgcagcaggctcatcaaatccatgcccgccagcatcccgacggacagcgccgccaccaacaaagccaccatactattgattttgaacttcaaattcagtaccagcatcagaccaatgccgaataccacccagagaatgttaagcacatgcataacgttttaccttacctggttgaaccgttgttattttgggcgatatgttatgtaaattggtcaaccattgttgcgatgaatgtcacatcctctgatcaataaccatcgattaccctttgctgcaatttgcagcaacaaccatgagagtgaaattcttgtgatgtggttaaccaatttcagaattcgggttgacatgtcttaccaaaaggtagaacttatacgccatctcatccgatgcaacgccacggctgcggtctggttgttcatccggatacctaaacaactccagggttccgcgtctctttgctgtggaacccactatgtgaaagaggaaaaatcatggaacagacctggcgctggtacggcccaaacgatccggtttctttagctgatgtccgtcaggcgggcgcaactggcgtggttaccgcgctgcaccatatcccgaacggcgaagtatggtccgttgaagagatcctcaaacgcaaggcgatcattgaagacgcaggcctggtgtggtctgtcgtagaaagcgtgccaattcacgaagatatcaaaacccacactggcaactatgagcagtggatcgctaactatcagcagactctgcgcaacctggcgcagtgtggcattcgcaccgtgtgctacaacttcatgccggtgctcgactggacccgtactgacctcgaatacgtgctgccagacggctccaaagctctgcgcttcgaccagatcgaattcgctgcattcgaaatgcatatcctgaaacgcccaggcgcggaagcggattacaccgaagaagaaattgctcaggcagctgaacgcttcgccactatgagcgatgaagacaaagcgcgtctgacccgtaacatcattgctggtcttccgggcgcggaagaaggctacaccctcgaccagttccgtaaacacctggagctgtacaaagatatcgacaaagcgaagctgcgcgaaaactttgccgtcttcctgaaagcgattattccagttgctgaagaagtcggcgtgcgtatggctgttcacccggacgatccgccgcgcccgatcctcggcctgccgcgcattgtttccaccattgaagatatgcagtggatggttgataccgtaaacagcatggcaaacggttttaccatgtgcaccggttcctacggcgtgcgtgctgacaacgatctggttgatatgatcaagcagttcggtccgcgtatttacttcacccatctgcgctccaccatgcgtgaagataacccgaaaaccttccacgaagcggcgcacctgaacggtgacgttgatatgtacgaagtggtgaaagcgattgttgaagaagaacaccgtcgtaaagcggaaggcaaagaagacctgatcccgatgcgtccggaccacggtcatcagatgctggacgacctgaagaagaaaaccaacccaggttactccgcaattggtcgtctgaaaggcctggccgaagttcgcggtgtcgaactggcgatccagcgcgctttctttagccgttaatatccaccggcatggctgcgcgccgtgccggttccttcttccttgccgtcactctttgaagacggattctggagtttacgatgactactattgttgacagcaatctgccggttgcccgcccgagttgggatcattctcgtctggaaagtcgcattgtgcatctcggttgcggggcgtttcaccgcgcgcaccaggcgctgtatacccatcatctgctggaaagcaccgacagcgactggggcatctgcgaagttaacctgatgccaggcaacgaccgcgtgctgatcgaaaacctgaaaaaacagcaactgctgtacaccgtagcggaaaaaggcgcagagagcaccgagctgaaaattatcggtagcatgaaagaagcgctgcatccggaaatcgatggctgcgaaggtattctcaacgcgatggcgcgtccgcaaacggcgattgtctctctaacggtcacggaaaaaggctactgcgctgatgcggcaagcggtcaactggatctcaataacccgctgatcaagcacgatctggaaaacccgactgcgccgaagtccgcgattggttacatcgtcgaagcgttgcgtctgcgtcgtgaaaaagggttgaaagcgtttacggtgatgtcctgcgataacgtgcgtgaaaacggtcatgtggcgaaggtcgcggtactggggctggctcaggcgcgtgacccgcagctggcggcatggattgaagaaaatgtcaccttcccgtgcaccatggttgaccgcatcgttccggcggcgacgccagaaaccttacaggaaattgctgaccagctgggtgtttacgacccgtgcgccattgcctgcgaaccgttccgtcagtgggtgattgaagataacttcgttaatggtcgcccggattgggataaagtgggcgcacagttcgttgcagacgttgtgccgttcgaaatgatgaagctgcgtatgctgaacggcagccactcttttctggcgtacctcggttacctcggcggctatgaaaccattgccgacaccgtgactaacccggcttatcgcaaagcggcctttgccctgatgatgcaggaacaagcgccaacgctgagcatgccggaaggtacagacctgaacgcctatgcgacgctgctgatcgagcgtttcagcaacccgtctctgcgtcaccgtacctggcagattgcgatggacggcagccagaagttaccgcagcgtctgctggacccggtgcgtctgcacctgcaaaacggcggcagctggcgtcacctggcgctgggcgtggctggctggatgcgttacacccagggcgtggatgagcagggtaatgccattgacgtggtcgacccgatgctggcggagttccagaagatcaacgcgcagtatcagggcgcagaccgcgtgaaagcgctgctgggcctgagcggtatttttgccgatgatctgccgcagaatgccgactttgttggcgcagtgacggcggcatatcagcagctgtgcgaacgcggtgcgcgcgagtgtgtggctgcgctgtaactaactgattaccctacagacttactggtcaatcaaactgatatttggttgaccagttttcgtttttttgcccacctgtacgtgccaacttccagtgctaatggtatagtttgagattaacgggggccgtaaaattgcccgttgtaggccggataaggcgttcacgccgcatccggcaaaaatttgattaaccgcacctaacggacacaacaccatgaaatctgccacctctgcgcaaagaccttaccaggaagtcggggcgatgatccgcgatctgatcataaagacgccgtacaatcctggcgaacggctgccgccggagcgtgaaattgcagaaatgcttgatgtcacgcggacggtggtacgtgaagcgctgatcatgctggagatcaaagggctggtggaagtacgccggggtgccggtatctatgttcttgataacagtggcagccagaacacagacagtccggatgccaacgtctgcaacgatgccggtccttttgagctgttacaggcgcggcagttattggagagcaacatcgccgagtttgccgctttgcaggctacccgcgaagatatcgtcaaaatgcgtcaggcattgcaactggaagagcgtgaactggcttccagtgcgccgggcagcagcgaaagcggtgacatgcagttccatctcgctattgccgaagcaacgcataacagcatgctggtggagctgttccgtcagtcctggcagtggcgggaaaacaatccaatgtggatccagttgcacagccatctggatgacagcctgtatcgcaaagagtggttgggcgatcacaaacagatcctcgccgcgttaatcaaaaaagatgcccgagcggcgaagctggcaatgtggcagcatctggaaaacgttaagcaacgtctgctggaattcagcaacgttgacgatatttattttgatggctatctgtttgatagttggccgctggataaagtcgacgcctgacttattataataagcgcaagggtaaacgttccttgcgctttcttaaattaagaagtcgcaatgagtattactttgtaaattgcagggtattgtttagctatctgtataacctgaatgttagtactcattcttcctggtagtaaggcgagattattaaagttgccatgcagcgtccggggaagtgttgggcgctgttttttttgtttcttaataatgtgttgtaagccgtagaaggcgtgtaggtcgcaccctatgcgacctacacatcagtcaggaattacccttcacgttctaccactttaatttccaccatgccgatcccgagcttacgcgggctgtgtccgaggatattcccttcgttggtactgacaggttccggcggcacaattaccagtgtgtcggcatcggttgggttatcgaaatgcagtgtggtggtggtcacttcattgcccagcacaagagtttgttcttcattgcctacgcgtaccggaataggacggctggcgttattgccgtatgctttggcggtaatcaccaggtcaaatttcttcggcagcggatgcttgtactcgatttttacttcatcgcccagctgcgcgttggaccagcggccccagctctccggacgggaaatcccgctaaactgtttcacctcttctggcgcaccggcgacgttaaagatgaaactgtcggctttgtagcgaatatcgttatcaacaatcttcagcgtatcgacattgcctttgtaacgcgccatgtcgatgaccgtatctttaaatgccgttttgccctgccatgttgttttgtcaacatgctgaacaatttgctgaccgccaagctgcccttggctgacacaccagtcggtggaaagtgccagttccggagcccagagttgtgccatcttgtagcaacggtcaacccagacgaaattgtcgcgtggagcgaaatcggccagctggaaacgcagcggtgcactgtattcgctttccggcagcggttccacgcgtttgtcactaacccgcaacagcagcggcaaacggaaatggctaccgctgaaggcaatcatgtttttctgctggtcgatggtgaactctttcatctctttagggaatttccacaggcggatgatatctggcttccacgccaatgttttctctttgatattgaggaagatttcgctcatgctctgcccggataaactgctacgaccaagtccgagatagttatcgccaccgagaatgtccagcaccgtcgcgccgttatccatcgtgttacgcttcactgccagcgtctcttgctgcggcttgtcgccacgaatgacaaaaaacaggttattgcgatcctgcttattgaggtatttccacgccgtgttgttcatcgctaaatggtcagaagagacgacgatgacggtatctttaaaccacggactcgctttgattttgttgataaacgtcgcgatgttctcctggctgcaacttaccgcgctgaaactctgattcggtttaccgtcaaaatcatattttttgcggttacaggtacgagagataaaaccatccgggtgatgggtatcgactgtcagggtaaacagactgaatcgctgaccactgcgggaaagctcttcaaactttttccacgcttcatcgagaacggtatcgtcgtagaatccccagtcgttgcgatagtgcgggtcggctaccacgcttttcagctcttcactgccgtataagtggtcgaagccatggctcttcaggaacacatctttaccggcaaaacgcagattcgcgccctgcacgaaatagttctgataaccgctgtttttcaggatatctcccagacagatgttctgcgggaagaagctggagacagaggcggaggcgttgccttcaaagggggcaaacagcggtatgccgcactgagaagccaccatgcccgcaatcgtgtaatctgttcccggcagctgctgcgtgtggctgaaatccaggccttcatttttcaacgcgcccagttcaggcgtgagatccgggaaagcctcgttatcaaaataggtccgctcgagactttcgccgtagatataaaccaggttgagtttcgggtcagggatagttttgctcggctctttataataagccgcaaagtccgggtcgccgtcgcgactctgggatttcaccagttccgttatctgacgaaatgccgggctggcgtccacgctacccagcgccagtaagagcgccagcaggctgtaaccaaaatggtgcggatgatggcgacgacggcgcaggatccagcccagcgcaccgaacaccgctgtcagccccagcacaatgccgatacccggcaaaatgtatttgctgacgccagcaccggtcaggctgttggttaaggtatagagaaccgcgtcgttaataccatcgccagtaaaatagtcgctggcaaacagggtgatatttaaaacgacaaatagccccagcaccgttaacgtggctgcaaaccaccaggtgttacgtcccgctttccatgcgtaaatcagcacagaggcgagaaaaagggcgaaagagagtagttcactcaacgggcgatcctcactaaaccgggccgtttagccaacgtttaagctttttgagaagcacaatgtaatggcgtcgccatattgctgcaattctagtgtcaaaaaaatgcgatgttgttaggaattagtttataaacagacttttttgattacggtcacttcccgtgtaacaggggtaaaaccgtccaggagcagggaaaagggcaggagagagccgcgtcagccgggtaacagctaaaacgcggcgtttcgcggttcaggaaatgaagttcagcccctgttttaacaccagatcgcaggctttggttttcaccttttctgccagcggagttgttccgatgttatccagattgagttgctgaccatctttggttttcagcaaaccctgaatgccgtccagatagttggtgtcttctttttgctcttcactgttcaggcccagcttttccagcacctggttcttgatgttttcggcatcggttacgctcgccagcttttgcttcgcgcagtattgcagaatgcctgcggcattgttcatgttatctgcgcttaaggcctggtttccgctgctaagcaagttagttaaactcgcgaggctccaaccgccttcctgtgtcgtgctgttttggttgccaagttcgctggcggcgctggagagcgcatctttccaggacgcagcatgcaccccggtggaaattaatgcgctggcggcaatggcacagcacagaagatgtttaacagttttcatcatcattactcaaggtggaattgtgtcgcagtataccgccagaaacggggattaatactctttacctgttacccggctacggtagctatcccagttgaagatcacccacaaactgttacccaggcgcatacggtccatcacgcgttcgcccagcaacttggtcatctcttccatattactgttggtcagcatcccggttgggcgtttggaagaagagcggcgatcgacgatctggttgatgatcactttttcgtatttgctttcggtctgcacgccgatctcatcgatcaccagcagatcaacgttgctcagatcgttaagcagttgttcttcgctggtaccgctattcctgaaggtatctttcatcgcgctcataatatcggccacggtgatgatcaatacggatttaccgcgtagcagcagctcgttgcagattgccgccgccagatggtttttgccggttcctggcttaccagaaaagatgaagctggcgatgttgccgtcaaactcttcgacatactggcgcgctttgcttaacgcattcatctgcccttcacactcaacgcgatagttctcaaaggaacagttctgatgcagtggacgaataccggagcggttaaaggtgcgctgcattttcatcgcccgattttcacgttcgagagcggcggagcggatcgctccttgttctttttgccaggccagtagttcttcacccgttttgaatgcgggtttgatatgggcaggcatcattttttgcaggcgttgcatcaggtcgccaacgtttttcatcgttaccctctgaatcctggtggaatttggctgtcaggttcgctgaccgtattcacatctcgtttcggcagtccgccgttgctggcacgaccgatttgcaggctgcgcgccagtttttgttgccactgcacatggtgaaagactttaccttccgcctgccagtaggcaatgaaactggccagttcttcggtggtcaccggctctcttagcgccacgccccatagcgccgccaggcggataaaatcggcatcgggttgccagtccggatacatggcgaatttccccatgggtacagcaacgggagcggcttgcggttcctgatagagttgatcgtccagagcgacatcgcttcccggacgcgccagcttttcttccagcgccagcagttcagccaggcgtgcaggcgtgacggcataaaacgccggggcattgttagcaaatacggcaaccacaccgccttcagcttttgccagaacggtttggtgatcgtgtaccagggcgtcaataccaacgacgtccggggtcaaaactctggaagacatactgtttctcaaatatggaacgatgaacgagaagggagataacttttatagtaacacacggaggagaggaggctgtctctcatccgtgtgcttaagcgaggcaattttatacgcgagggcgcttgcggtacaaccataatccaggaatggaaagaccgatggataacgcaccaacaatgctactagctgtaagaaagttggttaacagggtaatcatcaacggttcgctgtaacctaactggctgatttttaccgcgctaatcattgcggtataagcgcttatgcccgggaacatagggataacggccgccacggtaaacactttcggatgcgccagataccagcggctccattgaataccaatggtaccgaccagcatagaagccataaaggtactccactcaatattcaacccgctggtcatcaagatcattcgggaaccatgacctatcgagccaagcagcgcacaccagcgtaacgcccgcacgggaacgttgaacaccatcgcaaagccgaccgcaggaatggcggcgaggatcatatcctgcgccaacgctaacagaaattcgatcacacccatccgcgtagcccccaaatcgtcagtgccatcactacgccgacgcaggtagccagtgtcagcagactggcgatcgcccagcgtgccagtccggtattgatgtggcctttaaacatatcggcgacggcattaatcaacggaaagcccggcactagcagcagaacgctggcggccatcgcaatggtgggggtattgctgaaagtggggagttgcaaaagcaatccggaaatggtggtggcggcgaaagcggtaaggcaaaagttgatctgtggatgaagatgacgttgtgccagcagctggcggatatacatcgcggtcgtactggcaaagaaggtgatgacggcaccatcccagccaccgttattgagtttacagaaacaggcgcaagaaaggccaaccattaaggctaccagccatcttgggtaacgtaatggctgaatttggctaaatcgtttctctacgcctttgtaatccagcagatgatgctccgcaagaatcacaatgtgctggacttcagtcaccacatgcatattaatgccgcgatcgtgatttttacgtgtgcttgtcaggcattgcccatctttaatagttgtcagcactatggcgttgctagagatagaactttcgacgctgtccattcccagtgcccgacccagtcgactggaaagctcatcaaccaacgcgctttccgcaccatgttgcaaaagaaataatccacactggatacaaagccgtgttacggctcgctgttgctcagtttgcataactcgccctttgtcatagacgtgctgcgtattgttcagataatgagaatccatttgtatcatgaagcacggttgttttgcggtaggttaagatcaaaattgcgctgattaatcctggttatcgggagaagctcggtgataaaaagcgaattatctctcgccgcaaacaaactatcacatgaatattatcatcataatgaatttattgtttggcctttacgaatcaggataatagataaccgggcacgttttttaatgttaacaagctaaaaccatcagatttcattgaataaatattggttgtgtgattttgcattctgcgggaagggatatcatttaattataaattaaatgaatgtgatttctgtttttcattaagtattcctaacaacttaatgtagatattttaaatgtctccaggctatttcaccaggttatcatttgatgctaaccttctgacacatgcagtggagttgttgtgcagcaggagtatgctgatatgaaagtgaatgctaaggataatttattcgcttaatctattaatttgctggaaacatttaaggaatgaatatcctgaataaaccatcataatttttagacagtggatgtggaggaaatatgttgccaggatgctgcaaaaatggaattgttatcagtaaaatacctgttatgcaagcagggttaaaagaggtcatgaggactcacttccctgaatatgaaataatatccagcgcctctgcggaggaccttaccttattacaattacgtcgttccggattagtcattgctgatttagccggtgaaagtgaagatccacgttctgtttgtgaacattattattctttaatcagtcaatatcgggaaattcactgggttttcatggtgagtcgctcctggtattcccaggcagtagaactgctcatgtgccctacggcgacgttattgtctgatgttgaacccattgagaatctggtcaagaccgtacgttccggcaatacgcacgcagagcgtatcagcgccatgctgacctccccggcaatgactgaaactcatgattttagctatcgctccgtcattctcactcttagtgagcgcaaggtactgcggctattaggtaaaggatggggcatcaaccagatagctagtttgcttaagaaaagtaataaaactatcagcgcccaaaaaaacagtgcgatgcgtcgactggcaattcacagcaacgctgaaatgtatgcatggataaatagcgcgcagggtgcaagagaacttaacttgccttctgtttatggagatgccgcagaatggaacacagccgaattaagaagagaaatgagccacagttaaaaaaatgcgtcatgagtagtatcggtattgagagtttattcagaaagtttgcgggtaacccttataagctccatacctataccagtcaggagagttttcaggatgccatgagccggatcagctttgcggcggtcattttttctttttctgccatgagaagtgagcgcagagagggattatcttgcctgactgaactggcgattaagtttccgcgtacccggcgtttagttattgcggatgatgatattgaagctcggctgattggtagtttgagcccaagtccgctggacggtgtattaagtaaagcgagtacgctggagatttttcatcaggaactctttttgagtttaaatggtgtacgtcaggcgaccgaccgactgaacaatcagtggtacattaaccaaagccggacgttaagcccgacggagagagaaatattgcgctttatgagccgtggctacagtatgacacaaattgccgagcagcttaaacgcaatatcaaaacgatccgtgcacataaatttaatgtgatgagcaaactgggcgtcagttctgacgcagggttgttggaggccgcagatattctgttatgtatgcggcattgcgaaacaagtaatgtgttgcatccctattaatccgcatgatgccgggtttacttccccggcagtgctttcatttcagcgtacaatcgccacattgctgcacatccggtaagcgataacgctggcagcaagtgcggcgcaccagcaggccgtcgcgcagtaccacggtacgccagagtggattatcttcaccgttcgtgagcgttttctcaaaaaagagggcatggcgcaggctttcaacagtagcctcgccgagcagttgcttcatctcagtgagataccagttgatcaaataaccggtattactccagataagtttgccgttgatctctccggtcgcttctagtgcttgcacaaccggaaccagcgcctggctgattaacgtttccattcgatgctgcgggctatgtggtgttgcgtttttatcttcacacacatcgacccagaaacaggcgacgcgtccggtttcgtgaaactcagcatggaaatgttccgggctcacatctaatgccttttcctgcgtcagtagcgccagcattaatggtggcaccatcaggccgatataccattgtgcccatagactgatcagcggtttgttctcgcggatcatcatcggttggttgcgatagatatgatcggaatagaccgccagcagagaacttagcacattcggactactccattgcgccagcgtcatggcgttaagtggggcaggttcatccaggcggataaactccagcaaatgttcacgatgttttgcgatcgtcgcccgcacggcttgcgcaagcgtgggatcctgcggctggagatgcgttcgccagatgacatcttcatagagcggtgcggaacgataggccataatcgggatagtaatctaaatgataatgattgctaatcatagcgataggtttacccgatagcaagggatttatctggcttgcaaatgataaaaattatcatatgatattggttatcattatcaatgaaagagatgaaatcatgttgcaacgtacgctgggcagtggctggggagtgttgctgccgggattgctgattgcggggctgatgtatgcggatttaagcagtgatcagtggcggattgtcattctgatgggattagtattgacgccgatgatgctgtatcacaaacagttgcggcattacattttgctaccaagctgcctggcacttattgctggcatcatgctgatgataatgaatttgaatcagggatgaaaaatcaaggaagaaacaagaaaggaagtaaagataattggtgcgaggggggggacttgaacccccacgtccgtaaggacactaacacctgaagctagcgcgtctaccaattccgccaccttcgcacagtcatcttactttttttgatatcgcctcgtttggtgcgaggggggggacttgaacccccacgtccgtaagaacactaacacctgaagctagcgcgtctaccaattccgccaccttcgcccagtgcgagcaatatcaacgtggtttttggtgcgagggggggacttgaacccccacgtccgtaaggacactaacacctgaagctagcgcgtctaccaattccgccaccttcgcataccatcaattcttaaaaagaattgctaccacggaggcgcattctagtggttttcagcttttcgtcaatagttaattatcgacagaggtgtaattgctggaaaaatgtccatcaggaaactagcgtgcaggtttggtatgcatgcgggggcagatgccagatgcgacgctggcgcgtcttatctggcctacgaagggctaacgtgcaggttttgtaggtcggataaggcgttcacgccgcatccgacacggtattcggcgagataattaacctttcttcgcctggcgggtcataatggcgcgatacaccttgaagcgccctgtttgcgcgatcacttcgtggaagccaaatgtctcatccagcacgtccggataaggcaggaaggcgttcgctacaattcgcagctcgccgccgctattaagatgacgcaccgcaccgcgaatcagcgtttgcgccgcatccaggctggtttgcatcccatcgtggaacggcgggttggagatgatcatatcaaaacgacctttcacctcggaaaagacgttgctggcaaagacttcaccttcaacaccgttggccgcaagtgttgcgcggctggcttctaccgccggggcagagacatcgcacaaggtgagacgaattttcgggctatggcgcgcaaaggcaacactaagcacgcccgcgccacagccgacatccagcactttacctttcgtgtgcggagttaacgtgctgagcagcaactggctaccgacatccagaccgtcgcggctaaacacgccaggcagcgttttgaccgtcaggccatcgacgctgtattcgccccagaatttctccgcatcaaataccggctgtttttccagacgaccaaaatagaggccacagcgacgagcgctgtcgactttattcaacggcgcataatctgccagcatctgctcggcgctgcgcacgccgctgcggttctcgccaacgacaaaaatatctgtccccactggcagcagagaaagtaaattcatcaactggaactgggcttccggtttgttcttcggccagtagtaaatcagcgtatcgcaatctgcgacgtcatccgccgtggcgaccagactgaaacgggcgttatcccccatctggcggcttaatacctgccagtggtggaattgctgggtatgagcacggctggccgcggtatctaaacgcgcgggcaggtcatcctgtaagtctccggcaaacagaatacggctttgttcgaaatcatcactgtgacgcagcaagacttcacttgccggggtaaatgcagacatggaatgctcctcaattgatactggcggcgattatagccatatgttggcgcggtatcgacgaatttgctatatttgcgcccctgacaacaggagcgattcgctatgacatcccgacgagactggcagttacagcaactgggcattacccagtggagcctgcgtcgccctggcgcgttgcagggggagattgccattgcgatcccggcacacgtccgtctggtgatggtggcaaacgatcttcccgccctgactgatcctttagtgagcgatgttctgcgcgcattaaccgtcagccccgaccaggtgctgcaactgacgccagaaaaaatcgcgatgctgccgcaaggcagtcactgcaacagttggcggttgggtactgacgaaccgctaagtctggaaggcgctcaggtggcaagtccggcgctcaccgatttacgggcaaacccaacggcacgcgccgcgttatggcaacaaatttgcacatatgaacacgatttcttccctcgaaacgactgatttaccggcggcttaccacattgaacaacgcgcccacgcctttccgtggagtgaaaaaacgtttgccagcaaccagggcgagcgttatctcaactttcagttaacgcaaaacggcaaaatggcggcgtttgcgattacgcaagtggtgctggatgaagctacattgttcaatattgcggtcgatcctgactatcagcgtcagggattgggaagggcgctgctggaacatctgatcgacgaactggaaaaacgcggcgtggcgacactatggctggaagtccgtgctagtaacgctgccgccattgccctgtacgaaagtttaggctttaacgaggcgacgattcgccgcaattactaccccaccacggacggtcgcgaagacgccatcatcatggcgttgccaatcagtatgtaatacaaggtggaataatgaagtgggactggattttctttgatgccgatgaaacgctgtttacctttgacagtttcaccggcctgcagcggatgtttcttgattacagcgtcacctttaccgctgaagattttcaggactatcaggccgttaacaagccactgtgggtggattatcaaaacggcgcgatcactagtttacagcttcagcacgggcggtttgagagctgggccgaacggctgaacgtcgagccaggtaaactcaacgaagcctttattaatgcgatggcggaaatctgcacgccgctgccgggcgcggtttctctgcttaacgccattcgtggcaacgccaaaatcggcatcatcaccaacggctttagtgccttgcaacaggtgcgtctggaacgcacgggcctgcgtgattacttcgatttgctggtgatttccgaagaagttggcgttgccaaaccgaataagaaaattttcgattatgcgctggaacaggcgggcaatcctgaccgtagtcgcgtgctgatggttggcgacactgccgagtccgatattctcggtggcatcaacgccgggcttgcgacctgctggctgaatgcacaccatcgcgagcaaccagaaggcatcgcgcccacctggaccgtttctagcttgcacgaactggagcagctcctgtgtaaacactgattgcctcccccccgttgatgggtaaaatagccgcaatttttcgttttcaacaagcgcggcgcgatgccgcttactcaagaagaaagaattatgacgttgtctccttatttgcaagaggtggcgaagcgccgcacttttgccattatttctcacccggacgccggtaagactaccatcaccgagaaggtgctgctgttcggacaggccattcagaccgccggtacagtaaaaggccgtggttccaaccagcacgctaagagcgactggatggagatggaaaagcagcgtgggatctccattactacgtctgtgatgcagtttccgtatcacgattgcctggttaacctgctcgacaccccggggcacgaagacttcagcgaagatacctatcgtaccctgacggcggtggactgctgcctgatggttatcgacgccgcaaaaggtgttgaagatcgtacccgtaagctgatggaagttacccgtctgcgcgacacgccgatcctcacctttatgaacaaacttgaccgtgatatccgcgacccgatggagctgctcgatgaagttgagaacgagctgaaaatcggctgtgcgccgatcacctggccgattggctgcggcaagctgtttaaaggcgtttaccacctttataaagacgaaacctatctctatcagagcggtaaaggccacaccattcaggaagtccgcattgttaaagggctgaataacccggatctcgatgctgcggttggtgaagatctggcacagcagctgcgtgacgaactggaactggtgaaaggcgcgtctaacgagttcgacaaagagctgttccttgcgggcgaaatcactccggtattcttcggtactgcgctgggtaacttcggcgtcgatcatatgttggatggcctggtggagtgggcacctgcgccgatgccgcgtcagactgatacccgtaccgtagaagcgagcgaagataaatttaccggcttcgtatttaaaattcaggccaacatggacccgaaacaccgcgaccgcgtggcgtttatgcgtgtggtgtccggtaaatatgaaaaaggcatgaaactgcgccaggtgcgcactgcgaaagatgtggtgatctccgacgcgctgacctttatggcgggtgaccgtagccacgttgaagaagcgtatccgggcgatatcctcggcctgcacaaccacggcaccattcagatcggcgacacctttacccagggtgagatgatgaagttcaccggtattccgaacttcgcaccagaactgttccgtcgtatccgcctgaaagatccgctgaagcaaaaacagctgctcaaagggctggtacagctttccgaagagggcgcggtgcaggtgttccgtccaatctccaacaacgatctgatcgttggtgcagttggtgtgctgcagtttgatgtggtggtagcgcgcctgaagagcgaatacaacgttgaagcagtgtatgagagtgtcaacgttgccactgcccgctgggtagaatgtgcagacgcgaagaaattcgaagagttcaagcgtaagaacgaaagccaactggcgcttgatggcggcgataacctcgcttacatcgctaccagcatggtcaacctgcgcctggcacaggaacgttatccggacgttcagttccaccagacccgcgagcattaattcttgcctccagggcgcggtagccgctgcgccctgtcaatttcccttccttattagccgcttacggaatgttcttaaaacattcacttttgcttatgttttcgctgatatcccgagcggtttcaaaattgtgatctatatttaacaaagtgatgacatttctgacggcgttaaataccgttcaatgcgtagatatcagtatctaaagccgtcgattgtcattctaccgatattaataactgattcagaggctgtaatggtcgttattcatcactcatcgcttttgtgatggcgaccattgacttctgtagagggtgaagtctctccctattcagcaatgcaacctcgtgttgccaggctcaaattacgagcaaacatacaggaataaatcgatgactatgacaagactgaagattagcaaaactctgctggctgtaatgttgacctctgccgtcgcgaccggctctgcctacgcggaaaacaacgcgcagactaccaatgaaagcgcagggcaaaaagtcgatagctctatgaataaagtcggtaatttcatggatgacagcgccatcaccgcgaaagtgaaggcggccctggtggatcatgacaacatcaagagcaccgatatctctgtaaaaaccgatcaaaaagtcgtgaccctgagcggtttcgttgaaagccaggcccaggccgaagaggcagtgaaagtggcgaaaggcgttgaaggggtgacctctgtcagcgacaaactgcacgttcgcgacgctaaagaaggcagcgtgaagggctacgcgggtgacaccgccaccaccagtgaaatcaaagccaaactgctggcggacgatatcgtcccttcccgtcatgtgaaagttgaaaccaccgacggcgtggttcagctctccggtaccgtcgattctcaggcacaaagtgaccgtgctgaaagtatcgccaaagcggtagatggtgtgaaaagcgttaaaaatgatctgaaaactaagtaattcgtcgtaattcgtcctcccgaactttgtcgggaggcgcgatgtgcaccacactaaaaatatcgcattgagtgattttcacgctcatatcaagcggtgacattaactatggtaaaggagacgcttatgtttcgttggggcatcatatttctggttatcgcgttaatcgccgccgcacttgggtttggtggtctggccggtaccgctgcaggcgcagctaaaattgtctttgtcgtcgggattattctgttcctggtgagtttgttcatgggccgaaaacgaccctaaatttcagaccattaagaaaattttatccaaagccagtccagcggactggcttttgcggttttagcgaataataaattgcgttactttgtcattctttcacaacaaaaacaggaaggcagaggtggggcagcgaatacctgtaacgcttggtaatattgcgccgttgagcctaaggccgttccagcctggacgaatagctctggtgtgcgaaggcggcggacagcgtggaattttcacggctggcgtgctggatgagtttatgcgcgcgcagtttaatcctttcgatctttatctcggcacatctgccggggcgcagaacctcagcgcgtttatctgcaatcagcccggttacgcgcgcaaagtcatcatgcgctataccacaaaacgcgaatttttcgatccattgcgctttgtccgtggaggaaatcttatcgatctcgactggctggtggaggccactgcaagccagatgccgttgcaaatggataccgccgcgcggttgtttgacagcggcaaaagcttttatatgtgcgcctgtcgtcaggatgactacgcgccgaattactttttaccaaccaaacaaaactggctggatgtgattcgcgcctccagtgcgatacctggcttttatcgtagcggagtgagcctggaaggcattaactacctggatggcgggatcagtgatgcgattccggttaaagaggcggcaaggcagggcgctaaaacgttggtcgtcattcgcactgtgccgagtcaaatgtactacacgccgcagtggttcaaacgcatggaacgctggctgggtgacagtagcctgcagccgctggtcaatctggtgcagcatcatgaaaccagctatcgtgacattcagcaatttattgagaaaccaccgggcaagctgcggatattcgaaatttatccgccgaagccattacatagtatcgcgcttggcagtcggattccggcgctgcgtgaagactataaacttgggcgtttatgcggtcgttatttcctcgccacggttggcaagctattaactgaaaaagcgccgcttacccgccatctggtgccagtggtgacgccggaaagcattgtcattccgcctgcgccagtcgccaacgatacgctggttgccgaagtgagcgacgctccgcaggcgaacgacccgacatttaacaatgaggatctggcttgatttgccgttttatcgacacccactgccattttgatttcccgccgtttagtggcgatgaagaggccagcctgcaacgcgcggcacaagcgggcgtaggcaagatcattgttccggcaacagaggcggaaaattttgcccgtgtgttggcattagcggaaaattatcaaccgctgtatgccgcattgggcttgcatcctggtatgttggaaaaacatagcgatgtgtctcttgagcagctacagcaggcgctggaaaggcgtccggcgaaggtggtggcggtgggggagatcggtctggatctctttggcgacgatccgcaatttgagaggcagcagtggttactcgacgaacaactgaaactggcgaaacgctacgatctgccggtgatcctgcatagtcggcgcacgcacgacaaactggcgatgcatcttaaacgccacgatttaccgcgcactggcgtggttcacggtttttccggcagcctgcaacaggccgaacggtttgtacagctgggctacaaaattggcgtaggcggtactatcacctatccacgcgccagtaaaacccgcgatgtcatcgcaaaattaccgctggcaagcttattgctggaaaccgacgcgccggatatgccgctcaacggttttcaggggcagcctaaccgcccggagcaggctgcccgtgtgttcgccgtgctttgcgagttgcgccgggaaccggcggatgagattgcgcaagcgttgcttaataacacgtatacgttgtttaacgtgccgtaagccggataaggcgttcacgccgcatccggcagttggcgcacaatgcctgatgcgacgcttaacgcgtcttatcatgcctacaggtttgtgccgaaccgtaggccggataaggcgttcacgccgcatccggcagttggcgcacaatgcctgatgcgacgcttgtcgcgtcttatcatgcctacaagtctgtgccgaaccgtaggccggataaggcgttcacgccgcatccggcagtcggcgcataatgcctgatgcgacgcttgtcgcgtcttatcatgcctacaggtttgtgccgaaccgtaggccggataaggcgttcgcgccgcatccggcagttggcgcacaatgcctgatgcgacgcttgacgcgtcttatcaggcctacaagtctgtgccgaaccgtaggccgtatccggcatgtcacaaatagagcgccggaaatatcaaccggctcaccccgcgcacctttaacgcatcagccaacggctcaacgtcttccggcgtggcgctcgcccagctttgcgcctcgccatacacgccgtgggcatgaaacgcgttcaggcgtaccggaacatcgccgagtcccttgataaacgccgccagttcttcgatgtgttgcaaataatccacctggccagggatcaccagcaaacgcagttccgccagcttgccgcgctctgccagcaaatagatgctgcgcttaatctgctgattatcgcgtccggtgagttgttgatgacattcgctcccccacgctttgagatcgagcattgcgccgtcgcacaccgggagcaatttttcccagccggtttcgctcaacatgccgttactgtccaccagacaggtgagatggcgcagttgcggatcgtttttgatagcagtaaacagcgccaccacaaacggcagctgggtcgtggcttcaccgccactcaccgttatcccttcgataaacagcactgctttgcggacatggctaagcacttcgtccacgctcatggattgcgccatgggcgtggcatgttgcggacacctcttcaggcaggtatcacactgctcgcaaaccacagcgttccacaccactttgccgtcaacaatctgcaacgcctgatgcggacactgtggcacgcactccccacagtcattgcaacgtcccatcgtccacggattgtgacagtttttgcagcgcagattgcagccctgcaaaaacagagccagacgactgcctggcccgtcaacgcaggagaaggggataatcttactgactaaagcgcatctgctgttcatggcttatcacgcgcggctggcgttccagaatacgagtgttgcgtgcggcttcttcgcccagccaggtggtgttggtgcgactaccttcggcgcgatatttttctaaatcgctcaaacgcaccatataaccggtaacgcgaaccagatcgttaccgctgacattggcggtaaattcacgcattccggctttaaaggcaccgaggcaaagctgtaccagtgcctgcgggttacgtttgatggtttcgtcgagcgtcagaatgtcgctgatgccggaataataataagcatgatgcggggcgacagtttgcagatgggtgatcggatctggctcatcgccatacggcaaacgcgcgcccggcgtggtgccgatatcggaactgatcccgctctgtgcgtgtaacatggcgcgtttttgccagccatatttcacgggggtattggcgacaaactccgccagttgcgcgctgatgcgataacctacttcatttgcggcggcttctttaccgtagcgcgcggcaatcccttctttttcacacagcaagttaaccgcttccgccagcccatacatgccaaacattggcacaaaacgttcagggttaatcagcccttctttcaccaggaagctattctcaaagaagtgactttgttgatagaggaattcacaccgcgcatcgatgatggcgatctgctgctggcagtagtgcggtagagtgcgcgtaaagaagtcatccaggctttcgctgcgctcggcaatggctttcaggttaaggcgtaccagcgtgctgccaccacccgccagcggcagactgttgtaacagctcacaatcccgtagcccccttttgtgaaaattttatcatgcaccggaccgttggcgatgtgcggtttgctacattcacagatgttcttcgccacttccagcagcaggtcatcaggggtgatttcaggatcgtagataaaggtcaggttcggactaacctgcttcaactctgcatctgcacgtaagatcgcgcgggtaatggggctatcagacgggccgatattggcgtgcataaaggcgtctggcagggttctgtcgaggtaacgccagaaacgttttattcgaacatcgatctcgtcttgtgttagaattctaacatacggttgcaacaacgcatccagttgccccaggtagaccggcatgcttgtgacgctcggtacgtggtggtaaagaatggtcagcagagagagtgcgtcatcaagatctttcgcgccttccagctccagccattcggaaccgttcgccagaaaacgggcgtaatcgggtaagacatagcgcggtttgtacggcgcatgaccttcaaacatatcgcagattacaccttcatccagcgcgcggcgggcttcggcaggaagctgtgggtaaggcagattgttttctgcttccagtgccagaaaatggcgcttctgctccgggctaagcactgggctggtgacaatttgctggcaacgttgttgcagtgcattttcatgagaagtgggcatcttcttttccttttatgccgaaggtgatgcgccattgtaagaagtttcgtgatgttcactttgatcctgatgcgtttgccaccactgacgcattcatttgaaagtgaattatttgaaccagatcgcattacagtgatgcaaacttgtaagtagatttccttaattgtgatgtgtatcgaagtgtgttgcggagtagatgttagaatactaacaaactcgcaaggtgaattttattggcgacaagccaggagaatgaaatgactgatctgaaagcaagcagcctgcgtgcactgaaattgatggacctgaccaccctgaatgacgacgacaccgacgagaaagtgatcgccctgtgtcatcaggccaaaactccggtcggcaataccgccgctatctgtatctatcctcgctttatcccgattgctcgcaaaactctgaaagagcagggcaccccggaaatccgtatcgctacggtaaccaacttcccacacggtaacgacgacatcgacatcgcgctggcagaaacccgtgcggcaatcgcctacggtgctgatgaagttgacgttgtgttcccgtaccgcgcgctgatggcgggtaacgagcaggttggttttgacctggtgaaagcctgtaaagaggcttgcgcggcagcgaatgtactgctgaaagtgatcatcgaaaccggcgaactgaaagacgaagcgctgatccgtaaagcgtctgaaatctccatcaaagcgggtgcggacttcatcaaaacctctaccggtaaagtggctgtgaacgcgacgccggaaagcgcgcgcatcatgatggaagtgatccgtgatatgggcgtagaaaaaaccgttggtttcaaaccggcgggcggcgtgcgtactgcggaagatgcgcagaaatatctcgccattgcagatgaactgttcggtgctgactgggcagatgcgcgtcactaccgctttggcgcttccagcctgctggcaagcctgctgaaagcgctgggtcacggcgacggtaagagcgccagcagctactaagtaagatgctttacgcctgatgcgctgcgcttatcaggcctacgagacgtatctacccgtaggccggataaggcgtagacgcatccggcaaaagccgcctcatactcttttcctcgggaggttaccttgtttctcgcacaagaaattattcgtaaaaaacgtgatggtcatgcgctgagcgatgaagaaattcgtttctttatcaacggtattcgcgacaacactatctccgaagggcagattgccgccctcgcgatgaccattttcttccacgatatgacaatgcctgagcgtgtcagcctgaccatggcgatgcgagatagtggaaccgttctcgactggaaaagcctgcatctgaatggcccgattgttgataaacactccaccggtggcgtcggcgatgtgactagcctgatgttggggccgatggtcgcagcctgcggcggctatattccgatgatctctggtcgcggcctcggtcatactggcggtacgctcgacaaactggaatccatccctggcttcgacattttcccggatgacaaccgtttccgcgaaattattaaagacgtcggcgtggcgattatcggtcagaccagtagtctggctccggctgataaacgtttctacgcgacccgtgatattaccgcaaccgtggactccatcccgctgatcaccgcctctattctggcgaagaaacttgcggaaggtctggacgcgctggtgatggacgtgaaagtgggtagcggcgcgtttatgccgacctacgaactctctgaagcccttgccgaagcgattgttggcgtggctaacggcgctggcgtgcgcaccaccgcgctgctcaccgacatgaatcaggtactggcctccagtgcaggtaacgcggttgaagttcgtgaagcggtgcagttcctgacgggtgaatatcgtaacccgcgtctgtttgatgtcacgatggcgctgtgcgtggagatgctgatctccggcaaactggcgaaagatgacgccgaagcgcgcgcgaaattgcaggcggtgctggacaacggtaaagcggcagaagtctttggtcgtatggtagcggcacaaaaaggcccgaccgacttcgttgagaactacgcgaagtatctgccgacagcgatgctgacgaaagcagtctatgctgataccgaaggttttgtcagtgaaatggatacccgcgcgctggggatggcagtggttgcaatgggcggcggacgccgtcaggcatctgacaccatcgattacagcgtcggctttactgatatggcgcgtctgggcgaccaggtagacggtcagcgtccgctggcggttatccacgcgaaagacgaaaacaactggcaggaagcggcgaaagcggtgaaagcggcaattaaacttgccgataaagcaccggaaagcacaccaactgtctatcgccgtatcagcgaataacggtatactgatctgatcatttaaatttgaagcactgagtacggagaacatatgaaacgtgcatttattatggtgctggacagtttcggcatcggcgctacagaagatgcagaacgctttggtgacgtcggggctgacaccctgggtcatatcgcagaagcttgtgccaaaggcgaagctgataacggtcgtaaaggcccgctcaatctgccaaatctgacccgtctggggctggcgaaagcacacgaaggttctaccggtttcattccggcgggaatggacggcaacgctgaagttatcggcgcgtacgcatgggcgcacgaaatgagttccggtaaagataccccgtctggtcactgggaaattgccggtgtcccggttctgtttgagtggggatatttctccgatcacgaaaacagcttcccgcaagagctgctggataaactggtcgaacgcgctaatctgccgggttacctcggtaactgccactcttccggtacggtcattctggatcaactgggcgaagagcacatgaaaaccggcaagccgattttctatacctccgctgactccgtgttccagattgcctgccatgaagaaactttcggtctggataaactctacgaactgtgcgaaatcgcccgtgaagagctgaccaacggcggctacaatatcggtcgtgttatcgctcgtccgtttatcggcgacaaagccggtaacttccagcgtaccggtaaccgtcacgacctggctgttgagccgccagcaccgaccgtgctgcagaaactggttgatgaaaaacacggccaggtggtttctgtcggtaaaattgcggacatctacgccaactgcggtatcaccaaaaaagtgaaagcgactggcctggacgcgctgtttgacgccaccatcaaagagatgaaagaagcgggtgataacaccatcgtcttcaccaacttcgttgacttcgactcttcctggggccaccgtcgcgacgtcgccggttatgccgcgggtctggaactgttcgaccgccgtctgccggagctgatgtctctgctgcgcgatgacgacatcctgatcctcaccgctgaccacggttgcgatccgacctggaccggtactgaccacacgcgtgaacacattccggtactggtatatggcccgaaagtaaaaccgggcagtctgggtcatcgtgaaaccttcgcggatatcggccagactctggcaaaatattttggtacttctgatatggaatatggcaaagccatgttctgatggatttgggcggagcgttgactccgcctttgttatgtcacaaaaaggataaaacaatggctaccccacacattaatgcagaaatgggcgatttcgctgacgtagttttgatgccaggcgacccgctgcgtgcgaagtatattgctgaaactttccttgaagatgcccgtgaagtgaacaacgttcgcggtatgctgggcttcaccggtacttacaaaggccgcaaaatttccgtaatgggtcacggtatgggtatcccgtcctgctccatctacaccaaagaactgatcaccgatttcggcgtgaagaaaattatccgcgtgggttcctgtggcgcagttctgccgcacgtaaaactgcgcgacgtcgttatcggtatgggtgcctgcaccgattccaaagttaaccgcatccgttttaaagaccatgactttgccgctatcgctgacttcgacatggtgcgtaacgcagtagatgcagctaaagcactgggtattgatgctcgcgtgggtaacctgttctccgctgacctgttctactctccggacggcgaaatgttcgacgtgatggaaaaatacggcattctcggcgtggaaatggaagcggctggtatctacggcgtcgctgcagaatttggcgcgaaagccctgaccatctgcaccgtatctgaccacatccgcactcacgagcagaccactgccgctgagcgtcagactaccttcaacgacatgatcaaaatcgcactggaatccgttctgctgggcgataaagagtaattgtgtttcgctgcaaggcgattgccttgtgaagccggagcgggagactgctccggctttttagtatctattcatttttctctccagcttgaatattttcgctatacttttcagtgaaatgtgttaataaatctattcaagtatctattcacgaatctattcattaatgagcgagctgactgatcttttactgcaagggccgcgttctgccccggaattgcgccagcgtctggcaatcagtcaggcgacgttcagtcgccttgttgccagagaagatcgggtgattcgctttggtaaagcacgggcaacgcgatatgcactgctgcgtccttatcgcggaattgagcgtattcccgtctggcgggtggacgataccggaaaggcgcataaattcgccgacatccggttgtgctggccgcagggaagttgtctggtaacaggcgcagatggcgacgaacagtggtttgatggtttgccctggtatttgaccgatctccgaccgcagggctttttagggcgcgcgtggggcaggaagttagccgcgcaactgaatctgactgatgatatacgtctctggcaggaagaagatgtgctctacgccctgaccgtatttaacggtgaatatactggcggttggttggtcggggaggggaattatcagcgatggattactgcacaacaccctgcggaaattcctctggatcaaaaactcacccattacgaacagctggcaagtgatgcactggcaggagaaattgtgggttcttctgcgggcggcgagcagccaaaatttacctactatgcacaaacgccgagtggcaataaacatgtgttggtgaaattcaccgtaccacagcaaaccgcggtcagccaacgttggggtgacctgctaattgctgaatctattgccgcgcaaatcctgcgtgacggtgggatccacgccatcgagagtacggtgcttgtaacaagtaacaggcaggtattcctcgaagcggaacgctttgactgcaaaggtaacgatggtcgcttgcctattgtgagcctggaggcggtgcagagtgagtttatctcttctccgggaagctggccgcaggcaatgcgccgtttgtgtgagcaacaacttgtcactcaccagagcgtggcgcaaacagaagtgatctgggcatttgggcgacttatcgccaacagcgatatgcacgcaggtaatttaagcttttatttatctgaaccgccatttgcgctgacgcccgtctacgacatgctgccgatggtctatgcaccaaacagcgctggaatgctgcgtgatgctgccattgaggtgaagtttgatcttaacgtcagtaaaagcgcttggttaacggcgatcccgctggcgcagcagttctggcaaacggtcgccagagatccgcgtatcagcgaggcgtttcgccacattgcgcaagaaatgccggaaaaaatccggcaaatcgaagagaaagttgcccgcatgggcgggtaattaccttacagcccccgccatccatgcgcttaactcccgtagctctttttcctgttccgggaagtcaaccaacagcgcttcgcactcctgttgcagcatatctgcgcggtacaggcagccttgcagtcgtccggcgagggcttccagcggcgcggggttgaggctgtcggtaaacacctgggcgcgggtgatatggcctttttcaacgtcgaaatgcagttccacgccgccccaggtaaagcgttcatccagcagatggctgaatgccggagcctgaccgaagttccattcccagctactctggcgggcaaaggtttcggcgaagtttggcaagtctggcgttttgttcggggagatgatttccgcttccacgcgctcgccataatgggcgaaaaaggcctcggttatggcctcgcaaacctgctcatgggtgatccccggcaacagctcggtgaggttggtcacgcgggaacgtacgctcgtaatgcctttcgccgccagtttctttttatccggattgagatagtttgccaggcggctgaggtcggcattgagtagcaaggtgccgtggtggaagccgcgatctttggtttcgcgataggcgctgccactgactttgcggtcgccttcgacggttttcaccaccagatcgttacgtccggacgcttcggcgctgacgccgagcgcgttcagcgcattgagcacaatgctcgtggagatagttttatcgtactccggcttgccagccataaaggtaaagcaggtattgccgagatcgtggaacaccgcgccgccaccgctactgcgccgcgccaggcggacgttatcttcttccatccgccgggtattacactctttccacgggttctgcgcgcgaccaattactaccgtgtcggcattgcgccagagaaacagaacgcgctgcgtggcgggcatttggcgaaaaatacactcttccaccgccaggttaaaccacgggtcgtaagagtcagagatgagcaggcgtaatgtggacataacgatttcctttcttgtagtaatgggtcactcttttttctcgctttcttcctcttccggcaccggtttgctggcggctaacaggaaggggctttgctgccagcgggtgcgtttaccctgtagcagcgtgcgggtcagcactacaccgattgccagactgagcagcaacatcaggcgtaaaatgttagtggtgttatccacctgttgggcttcggtggcgagcgtatgggtgtcgagtgtcaggcgcagatagccgagcggtccgtttttacccgcaattggctcgacaatctgctggttaaaatagccgcctgcttttttaccgtcgagcgccagccggtcgcgcacttcgacgctttcgccagaacgtgcgataagatcgccttgttcgtcatacacacccgcgtcgaggatacggctttcatccgttaactgatcgaggatcgcctgaatgcgtttttcatccggactgtcggtacgcatcagcggtgcaacgttcagcgtcacctgacgcgccagggtgcgggccagttcttccagctgtggattacgctgtcgctggtggttttgactaaaccaactcgctccctgcatcagcgccactaacaaggcaagacagaacaggacaatcactgcccgatgcagccggaatttcagttttgtgcgagccatcttccaccctttgaaaatttgagacttaatgttgccagaagcaatggatacaaggtagcctcatgcgttattttccctgcttcgaacgattttacaggagccttaatgcctaacattacctggtgcgacctgcctgaagatgtctctttatggccgggtctgcctcttagtttaagtggtgatgaagtgatgccactggattaccacgcaggtcgtagcggctggctgctgtatggtcgtgggctggataaacaacgtctgacccaataccagagcaaactgggtgcggcgatggtgattgttgccgcctggtgcgtggaagattatcaggtgattcgtctggcaggtagtctcaccgcacgggctacacgcctggcccacgaagcgcagctggatgtcgccccgctggggaaaatcccgcacctgcgcacgccgggtttgctggtgatggatatggactccaccgccatccagattgaatgtattgatgaaattgccaaactggccggaacgggcgagatggtggcggaagtaaccgaacgggcgatgcgcggcgaactcgattttaccgccagcctgcgcagccgtgtggcgacgctgaaaggcgctgacgccaatattctgcaacaggtgcgtgaaaatctgccgctgatgccaggcttaacgcaactggtgctcaagctggaaacgctgggctggaaagtggcgattgcctccggcggctttactttctttgctgaatacctgcgcgacaagctgcgcctgaccgccgtggtagccaatgaactggagatcatggacggtaaatttaccggcaatgtgatcggcgacatcgtagacgcgcagtacaaagcgaaaactctgactcgcctcgcgcaggagtatgaaatcccgctggcgcagaccgtggcgattggcgatggagccaatgacctgccgatgatcaaagcggcagggctggggattgcctaccatgccaagccaaaagtgaatgaaaaggcggaagtcaccatccgtcacgctgacctgatgggggtattctgcatcctcagtggcagcctgaatcagaagtaattgctcgcccgccatcctgcgggcggcacagcattaacgaggtacaccgtggcaaaagctccaaaacgcgcctttgtttgtaatgaatgcggggccgattatccgcgctggcaggggcagtgcagtgcctgtcatgcctggaacaccatcaccgaggtgcgtcttgctgcgagcccaatggtggcgcgtaacgagcgtctcagcggctatgccggtagcgccggggtggcaaaagtccagaaactctccgatatcagccttgaagagctgccgcgtttttccaccggatttaaagagttcgaccgcgtactaggcggcggcgtggtgccaggaagtgccattctgattggcggtaaccctggtgcggggaaatccacgctgctactgcaaacgctgtgcaaactggcccagcagatgaaaacgctgtatgtcaccggcgaagagagcctgcaacaggtggcaatgcgcgctcatcgccttggcctgccgactgacaatctcaatatgttgagcgaaaccagcatcgaacagatctgcctgattgccgaagaagagcaaccgaagctgatggtaattgacagcatccaggtgatgcatatggcggatgtacagagtagccctggtagcgtggcgcaggtgcgtgaaacggcggcttatttgacacgcttcgccaaaacgcgcggtgtggcgattgtcatggtggggcacgtaaccaaagatggtagcctggctggcccgaaagtgctggaacactgtatcgactgtagcgtgcttttggatggcgatgccgactcccgttttcgcaccttgcgcagccataaaaaccgcttcggcgcggtgaatgagctgggcgtcttcgcgatgaccgaacaggggctgcgtgaagtcagcaaccctagcgcaattttcttaagtcgcggcgatgaagtgacctccggtagcagtgtgatggtggtatgggaaggaacgcgtccactgctggtggagattcaggcgctggtcgatcacagcatgatggcgaacccacgccgcgtggcagtggggctggaacaaaaccgtctggcaatcctgctggctgtgttgcaccgtcacggtggtctgcaaatggccgatcaggatgtgtttgtgaacgtggtcggcggcgtgaaggtaaccgaaaccagtgccgacttagcgttactgctggcgatggtttccagcctgcgcgacagaccgctgccgcaggatctggtggtgtttggtgaagtcgggctggcaggggagatccgcccggtgcccagcggtcaggaacgaatctctgaagcggcgaaacacggttttcgccgggcgattgttccggcggctaacgtgccgaaaaaagcgccggaagggatgcagatttttggcgttaaaaaactctccgacgcgcttagcgtgttcgacgacttataatgagatatacggagggagatatgagcagttttgattacctgaaaactgccatcaagcaacagggctgcacgctacagcaggtagctgatgccagcggtatgaccaaagggtatttaagccagttactgaatgccaaaatcaaaagccccagcgcgcaaaagctggaggcgttgcaccgttttttggggcttgagtttccccggcagaagaaaacgatcggtgtcgtattcggtaagttctacccactgcataccggacatatctaccttatccagcgcgcctgtagccaggttgacgagctgcatatcattatgggttttgacgatacccgtgaccgcgcgttgttcgaagacagtgccatgagccagcagccgaccgtgccggatcgtctgcgttggttattgcaaacttttaaatatcagaaaaatattcgcattcatgctttcaacgaagagggcatggagccgtatccgcacggctgggatgtgtggagcaacggcatcaaaaagtttatggctgaaaaagggatccagccggatctgatctacaccagcgaagaagccgatgcgccacagtatatggaacatctggggatcgagacggtgctggtcgatccgaaacgtacctttatgagtatcagcggtgcgcagatccgcgaaaacccgttccgctactgggaatatattcctaccgaagtgaagccgttttttgtgcgtaccgtggcgatccttggcggcgagagcagcggtaaatccaccctggtaaacaaacttgccaatatcttcaacaccaccagtgcgtgggaatatggccgcgattatgtctttagtcacctcggcggtgatgagatcgcattgcagtattctgactacgataaaatcgcgctgggccacgctcaatacattgattttgcggtgaaatatgccaataaagtggcatttatcgataccgattttgtcaccactcaggcgttctgcaaaaagtacgaagggcgggaacatccgttcgtgcaggcgctgattgatgaataccgtttcgatctggtgatcctgctggagaacaacacgccgtgggtggcggatggtttacgcagcctcggcagtagcgtggatcgcaaagagttccagaacttgctggtggagatgctcgaagagaacaatatcgaatttgtgcgggttgaagaggaagattacgacagtcgtttcctgcgctgcgtggaactggtgcgggagatgatgggggagcagagataaccgtgatgaaactgctcaaaggcgaggtataaaatgagtttttttgatgagttgaaaacctctctggaagaggctgtcgagattaaacaaggtttgaaaaaacctgcacgggtgacccgccacgaaattgaggatgctaaggctgttgtagaccggaaacggtgttcacgccgcatccggcattcggtgctcaatgcctgatgcgacgcttaccgcgtcttatcaggcctacagttttacaacgtattgaaattgctggttttgtaggccggataaggcgttcgcgccgcatccggcattttacgcattacttcgcaatacgcttgtacttgatacgcttcggctccagcgcgtctgcgcccagcgtgcgtttcttgtactcttcgtactcggtaaagttaccttcgaagaactcaactttaccttcatcctggtaatccagaatgtgcgtggcgatacggtcgaggaaccaacggtcgtggctgataaccatcgcacagcccgggaactccagcagggcgttttccagcgcgcgcagggtttcgatatccaggtcgttggttggttcgtcgagcagcagcatgttgccgccaacctgcagcagcttcgccagatgcagacgaccgcgctcaccaccggagagttcaccaacgcgtttaccctgatcaacccctttaaagttaaagcggccaacgtaggcgcggcttggcatctcggtgttgccgatcttcatgatatccagcccgccggaaacttcttcccaaacggttttgctgttatccatactgtcacggaactgatcaacgctcgccagtttcaccgtttcacccaaagtgatggtgccgctgtccggctgttcctgaccagagatcatacggaacagggtgcttttacccgcaccgttcggaccgatgatcccgacgatcgctcctttcgggatgctgaagctcaggtcatcaatcagcagacgatcgccataggatttacgcaggttgctgacttccagcactttatcgcccagacgcggtccaggtggaataaacagttcgttggtttcgttacgtttctgatattcggtgctgttcagttcttcaaagcgcgccagacgtgctttacctttgctctgacggcctttagtaccttgacgtacccattccagctctttctcaatgctcttacgacgcgccgcttcttgactagcttcctgcgccaggcgctgatctttctgctccagccaggaggagtagttaccttcccacggaataccttcaccgcggtcaagttcgaggatccagcctgcaacgttatcgaggaagtaacggtcgtgggtaatcgccacaacggtgccttcgaagtcgtgcaggaagcgttccagccaggccacggattcggcatccaggtggttggtcggttcgtcgagcagcagcatgtctggtttttccagcagcaggcggcacaacgctacgcgacgacgttcaccaccggagaggttagcgattttcgcgtcccagtccggcagacgtagcgcatccgccgcacgctccagctgtacgttcagattatgaccgtcgtgagcctgaatgatctcttccagacggccttgttcagcggccagcttgtcaaaatcggcatccggatcggcgtacagcgcatacacttcatccaggcgtttcagggcgttaaccacttcactaaccgcttcttcaatggactcacgcacggtgtgttccgggttcagctgcggttcctgcggcagataaccaatcttgatgtctggctgcggacgcgcttcaccttcgatgtctttatcaatgcccgccataatgcgcagcagggtggacttacccgcgccattcagacccaggacaccaatttttgccccagggaagaaactcagagagatgtttttcaaaatatgacgtttcggcggaacaactttgccgacacgatgcatggtataaacgaattgagccacgttggacttcgcctctatgtttatcgtgataatgagttttcaaaggcgaagtgtagcctttttccccgcctaatcccagccggtcgatcaccctcgcagtaaaagtaaaaaagtgtccgtaacgtggcgtaaacggcaatgactggttagcataaatctattacgcggcatgacgctgcattgatgtatttacacttagaggatgcgcttgtggaaaaagccaaacaagttacctggcggctgttggctgccggtgtctgtctgctgacggtcagcagcgtggcgcgagccgacagtctggatgagcagcgtagtcgttacgcgcaaatcaagcaggcctgggataatcgacaaatggatgtggtcgaacaaatgatgcctggactgaaggattatccgctttatccctacctggaataccgccagatcaccgatgatctgatgaatcaaccggcggtgacggtcactaactttgttcgcgctaaccccacgcttcctcccgctcgcacgctgcaatctcgtttcgtcaatgaactggcgcggcgtgaagactggcgtggcttgttagcctttagcccggaaaagcccggaactaccgaagcgcaatgtaattactactatgcgaaatggaacaccgggcagagtgaagaagcctggcaaggggcgaaagagctgtggctaaccggcaagagccagcctaacgcctgtgacaagttatttagcgtctggcgtgcgagtggtaaacaagatccgctggcgtatttagagcgtatccgtctggcgatgaaagcgggtaacacaggcctggtaacagtgctggcagggcagatgcctgccgattaccagactatcgccagcgcaatcattagtctggcgaacaaccctaatacggtactgaccttcgcgcgtacaactggcgcgaccgattttacccgtcaaatggcggcggtggcgtttgccagtgtggcgcggcaggatgctgagaatgcacggctgatgatcccaagccttgcccaggcgcagcagcttaatgaagatcagattcaggagctgcgcgatatcgtcgcctggcgtttgatgggcaacgatgtcaccgacgagcaggcgaaatggcgcgatgacgccattatgcgcagccaatctactagccttattgaacgccgtgtacgaatggcgcttggcaccggcgatcgtcgcggcctgaatacctggctggcgcgtctgcctatggaagcgaaagagaaagatgaatggcgttactggcaggcggatttattgctggaacgcggacgtgaagctgaagcaaaagagattttgcatcaactcatgcaacagcgtggtttctacccgatggttgcagcacaacgcatcggcgaagagtatgagctgaagattgataaagcgccgcagaatgttgacagcgccctgactcaggggccggagatggcgcgcgtgcgcgagttgatgtactggaatctcgataataccgcgcgtagcgagtgggccaatctggtgaagagcaagagtaaaacagagcaggctcaactggcgcggtatgctttcaacaaccaatggtgggatcttagcgttcaggcaacgatcgccgggaagctgtgggatcatctggaagagcgattcccgctggcttacaacgatcttttcaagcgctacaccagcggtaaggagatcccgcaaagctatgcgatggcgattgctcgtcaggagagcgcctggaatccgaaagtgaaaagtccggtaggggccagcggcttgatgcagattatgcctggtacagcgacccatacggtgaagatgttctctattcccggttatagcagtcctgggcaattgctggatccggaaacgaatatcaacattggcaccagttacctgcaatatgtttatcagcagtttggcaataatcgtattttctccagtgcagcttataacgccggaccagggcgggtgcgaacctggcttggcaacagcgccgggcgtatcgacgcagtggcatttgtcgagagtattccattctccgagacgcgcggttatgtgaagaacgtgctggcttatgacgcttactaccgctatttcatgggggataaaccgacgttgatgagcgccacggaatggggacgtcgttactgatccgcacgtttatgatatgctatcgtactctttagcgagtacaaccgggggaggcattttgcttcccccgctaacaatggcgacatattatggcccaacaaagtccctatagtgcagcgatggcagaacagcgtcaccaggagtggttacgttttgtcgacctgcttaagaatgcctaccaaaacgatctccatttaccgttgttaaacctgatgctgacgccagatgagcgcgaagcgttggggactcgcgtgcgtattgtcgaagagctgttgcgcggcgaaatgagccagcgtgagttaaaaaatgaactcggcgcaggcatcgcgacgattacgcgtggatctaacagcctgaaagccgcgcccgtcgagctgcgccagtggctggaagaggtgttgctgaaaagcgattgattttgtaggcctgataagacgtggcgcatcaggcatcgtgcaccgaatgccggatgcggcgtgaacgccttatccgtcctacaaatacccgtaatttcaatatgtttggtaggcatgataagacgcggcagcgtcgcatcaggcgcttaatacacggcattatgaaacggactcagcgccaggatcaccgcctggtgatagacgctggcgcgagtgagtttcccggcggtaaacacgccgatcgccccttccttacgaccaatctcatcaataccggtataacggctcatcacgggaccaagcgcctcaccttcacgcactttttccagaatcaccgcaggcaacggcaaagtagcgctacgcgcctcgccgcgctggctggcgttttcaatcaccacccaactgaaagtgctgtcaccatcgatgccagcttcaatcgccacccaaaaatcagcctctggaagtaaacggcgggcattggctacccgatttcgtgcgccagcgcgcgtttcctcactgccaaagggctgttccggtacaccgctctcgacggcaacggatgcaatatggcaggatccttcgccgaagatctcgtgaaatgcctgcagaatggcctgaattttagcgggattggtggtcgcacagacaacttggtgcataatcagcattactcagaaaattaacgttacagcagtatacggaaaaaagcatgttacaggtatacctagtccgccacggtgaaacgcagtggaacgccgagcgacgtattcagggccagtctgacagcccgctgaccgccaaaggtgagcaacaggcgatgcaggtggcaacccgtgccaaagagcttggcattacgcatatcatcagtagcgatttaggacgcacccggcgtacggcggaaatcatcgcccaggcctgcggctgtgacatcatctttgattctcgcctgcgtgaattaaacatgggtgtgctggaaaaaagacatatcgattctctgaccgaagaagaagagaactggcgtcggcagctggtcaatggcaccgttgacgggcgtattcctgaaggcgagagtatgcaggagctcagcgatcgcgtcaatgcggcactggaatcttgccgggacttaccgcagggaagccgaccgctgctggtgagtcatggtattgcactgggatgcctggtgagtacgattctcggattaccagcatgggcagagcgccgcttacgtctgcgtaactgttctattagccgcgtggattatcaggaaagcctgtggctggcgtctggctgggtcgttgaaaccgcaggggacatcagccatctggacgcccctgcattagatgagctgcagcgttaacgacggatcggaatcagcagttcacagcgtagattaattgggcgatctcccgctttggcatcttctgccgggtagtatcgctcaatatcctgacctttacggcgcgtcaggttgagcattggcatgcacgttccgtataccgtcaggataaactcctgcacgccggttcccagaccttcataggtaaacatcacatattcgccgccctgcagcatcaccggatgccccgtcagtacatagccatctgcctgatcctgggctaacgcggtggtatagaatacctcttgctcgtcgtctttatcctgactcggacgcgtttcattcaggccgtagagcaccggcggaatggtcggcgcgttgccgagaaaatcgtgccagaactgataacgcatttcatggcggaaatcagagatttgctccaggctacaggagtagctctgggtaacaccaatcagcggcgtatcttccagggtgacaaatttgtgctctggcatagtgaattcacccaggcgtagcggcgggcgaataccaaaggcgctccattcaggagaacggcggtaaagtgcaggagtctgggcaaactgcttcttgaatgcgcgggtaaatgtctgttgagagtcgaagcggtattgcagcgcgatgtccagaatcggacgcgcagtcaggcgtagtgcgaccgcgcttttgctcaaacgacgagcacgaatatacgcgccaatagcatggccagtgacatctttaaacattctctgtaagtgccacttggaataacctgctttcgccgctacattgtcgaggctcaggggctgatccagatgaccttccagccagattaaaaggtcgcgaataatgccggcctgatccataaaatatcctcatcctttcaacaacgagcacctgacatcaggtaattggataatagcattttttgctgttttagcattcagtgtttttttcttagtagagtatgttttagggcttgacggaaataaaagtattgagattttgttcttaatcaatatgttatttaccgtgacgaactaattgctcgtgtaatagataaaaatggtaacaatatgaaatacaagcatttgatcctgtctttaagcctgataatgctggggccattggctcatgcagaagagattggtagcgtcgacaccgtatttaaaatgatcggcccggatcacaaaattgttgtggaagcctttgatgatcccgatgtgaaaaatgtcacctgttatgtgagccgggcgaaaaccggtggtattaaagggggattgggtctggcggaagatacctccgatgcggccatttcttgtcagcaagtcgggccgattgaactgagcgatcgtattaaaaacggcaaagctcagggcgaggtagtattcaaaaaacgcacgtccctggtctttaagagcttacaggtcgtgcgcttttatgatgccaaacgcaacgcgctcgcttatctggcttactccgacaaagttgtagaaggtagcccgaaaaacgcgattagcgcggttcctgtcatgccgtggcggcaataacagaggcgatttatgcaacgggaaacggtctggttagtggaagatgagcaagggatagccgacacgctggtctacatgttgcagcaggaaggttttgccgtcgaggtctttgagcgaggcttgccggtgctggataaagctcgcaagcaggtacccgacgtcatgattctcgatgttggtctgccggatattagcggctttgaattgtgccgccagttactggcgctccatccggcgttacctgtactgttcctgacggcccgaagtgaagaggtcgatcgcctgcttgggctggaaattggtgctgacgactacgtggctaaaccgtttagtccccgcgaagtgtgcgccagggtgcgcaccttactgcgtcgggtgaagaagttcagcacgccgtctcccgtcatccgtattggacattttgaattgaatgaacccgcggcgcagatcagctggtttgacacgccattagcgctgactcggtatgagtttttattgttgaagacgttactcaagagtccgggccgcgtctggtcccgccagcaactgatggatagcgtatgggaagatgcgcaggacacctacgatcgcaccgtcgatacccacattaaaacgctgcgtgccaagctgcgcgccatcaaccccgatcttagtccgattaatactcatcgcggcatgggatatagcctgaggggcctgtaatgcgtatcggcatgcggttgttgctgggctattttttactggtggcggtggcagcctggttcgtactggccatttttgtcaaagaagttaaaccgggcgtgcgaagagcaacggaggggacgttgatcgacaccgcaacgttgctggcggagctggcgcgtcccgatttgctctctggggacccaacgcatgggcaactggcgcaggcgtttaatcagctacaacatcgcccgtttcgcgccaatatcggtggcattaacaaagtgcgcaatgaatatcatgtctatatgaccgatgcgcagggcaaagtattgttcgatagcgcaaataaagccgttggacaggattatagccgctggaatgacgtctggctaacgttgcgtggtcagtatggtgcgcgcagcacgttgcaaaatcctgccgatcccgaaagttctgtgatgtatgttgccgcaccgattatggacggcagccggcttattggcgttttgagcgtaggcaaaccgaacgcggcgatggctccggtcattaagcgtagcgagcggcgaattttatgggccagcgccattttgttggggattgcactggtgattggcgcaggcatggtttggtggatcaaccgctctattgcccggctcactcgctatgctgattccgtcactgacaataagcccgttcctctccccgatctcggtagtagcgagttgcgtaaactcgcgcaggcgctggaaagtatgcgcgtgaagctggaagggaaaaactatattgagcagtatgtttacgcattaactcatgagctaaaaagcccactggcggcgattcgtggagcggcggaaattttacgcgaaggtccgccgccggaagtggtggctcgttttactgacaacattctgacgcaaaatgcgcgtatgcaggcattggtagaaacgttactacgccaggcaagactggagaatcgtcaggaagtcgttctgactgctgttgatgtggcggcattattccgccgcgtcagcgaagcgcgcaccgtgcagttggcagaaaaaaaaatcactctgcatgttacgcccaccgaggttaacgttgctgctgaaccggcgttactggagcaggcgctgggaaatttactggataacgccatcgattttacccccgagagcggttgcatcacgctaagcgccgaagtggatcaggaacacgtcacgcttaaggtgctggataccggtagtggtattcctgactacgcgcttagtcgtatttttgaacgcttttactctttgcctcgtgcaaatgggcaaaaaagcagcggtctggggttggcgttcgtcagtgaggtcgcccgtttgtttaacggcgaagtcacgctgcgcaacgtgcaggaaggtggcgtgctggccagccttcgacttcaccgtcacttcacataacttcaaattcttcccacatagtcttcgtatcctgctgccattgcaaaggagaagactatgttgaaatcccccctgttctggaaaatgactagcctgtttggtgcagtattgctgttgttgattccgataatgctgattcggcaggtgattgtcgaacgtgctgattaccgtagcgatgtggaagatgcgattcgccaaagtaccagcgggccgcaaaaactcgttgggccgctcatcgctattcctgtgaccgagctttatacggtgcaggaagaggataaaaccgtggagcggaaacgaagttttatccatttttggttacctgagagtttgatggttgatggcaatcagaacgtggaagaacgcaagatagggatttataccggtcaggtctggcacagtgatttaacgttaaaagccgatttcgatgttagccgtcttagcgaactcaacgcgccaaatatcaccttaggcaagccatttattgtgattagcgtcggggatgcgcgtggtattggtgtggtgaaagcgcctgaagttaacggaacggcgctgaccattgaacccggcaccgggttagagcaaggcgggcagggcgtgcatatccctttacctgaaggggactggcggaagcagaacctgaagctgaatatggccctgaatttaagcggtaccggcgatctttctgtggtgcctggcgggcgtaatagcgaaatgaccttaaccagcaactggccgcatcccagttttttaggtgattttctaccagccaaacgggaagttagcgagagtggttttcaggcgcactggcaaagcagctggtttgctaataatctcggtgagcgttttgctagtggcaatgataccggctgggaaaacttcccggcgtttagcgtcgcagtaacgacgccagccgatcaataccaattaactgaccgggcgactaagtacgccattctgctgattgcactgacttttatggcgttctttgtttttgaaacgctcaccgcgcaacgtttacacccaatgcaatatttgctggtggggcttagtttggtgatgttttatttgctcttgctggcgctttctgaacataccggttttaccgtggcatggataatcgccagtctgattggggcgataatgaacggtatttatttgcaagcggtattgaaaggttggtgcaacagcatgttgtttaccctcgcgctgttgttgctggatggtgtgatgtggggactgctcaactctgccgatagcgcgctgttgttgggaaccagtgtgctggtggtggcgctggccggcatgatgtttgtgacccgtaatatcgactggtatgcgtttagtctgccgaaaatgaaagccagtaaagaagttacaacggacgatgagttacgtatctggaaataaggttgaaaaataaaaacggcgctaaaaagcgccgttttttttgacggtggtaaagccgattaatcttccagatcaccgcagaagcgataaccttcaccgtgaatggtggcgatgatttccggcgtatccggcgtagattcgaaatgtttacgaatacggcggatcgtcacgtctacagtacggtcgtgcggtttcagctcacggccggtcattttcttcagcagttcagcacgggactgaattttgcctgggttttcacagaagtgaagcatggcgcggaactcgctgcgcggcagcttgtactgctcgccatcagggccgatcaagctacggctgttgatgtccagttcccaaccattgaacttgtagctttcaacgctacgacgttcttcgctgacagtacccagattcatggtacgggacagtaggttgcgtgcacgaatcgtcagttcacgcgggttgaacggtttggtgatgtagtcatctgcaccgatttcgaggccgagaattttatcgacttcgttgtcacggccagtcaggaacatcaacgcaacattcgcctgctcgcgcagttcacgcgctaacagaagaccgttcttacccggcagattgatatccatgatcaccaggttgatgtcatattcagagaggatctgatgcatttccgcgccatctgtcgcttcgaaaacatcatagccttccgcttcgaaaatacttttcaacgtgttgcgtgttaccaactcgtcttcaacgataagaatgtgcggggtctgcatgtttgctacctaaattgccaactaaatcgaaacaggaagtacaaaagtccctgacctgcctgatgcatgctgcaaattaacatgatcggcgtaacatgactaaagtacgtaattgcgttcttgatgcactttccatcaacgtcaacaacatcattagcttggtcgtgggtactttccctcaggacccgacagtgagtaaaacggctgtcatcctaaccattttaacagcaacataacaggctaagaggggccggacacccaataaaactacgcttcgttgacatatatcaagttcaattgtagcacgttaacagtttgatgaaatcatcgtatctaaatgctagctttcgtcacattattttaataatccaactagttgcatcatacaactaataaacgtggtgaatccaattgtcgagatttattttttataaaattatcctaagtaaacagaaggatatgtagcattttttaacaactcaaccgttagtacagtcaggaaatagtttagccttttttaagctaagtaaagggctttttctgcgacttacgttaagaatttgtaaattcgcaccgcgtaataagttgacagtgatcacccggttcgcggttatttgatcaagaagagtggcaatatgcgtataacgattattctggtcgcacccgccagagcagaaaatattggggcagcggcgcgggcaatgaaaacgatggggtttagcgatctgcggattgtcgatagtcaggcacacctggagccagccacccgctgggtcgcacatggatctggtgatattattgataatattaaagttttcccgacattggctgaaagcttacacgatgtcgatttcactgtcgccaccactgcgcgcagtcgggcgaaatatcattactacgccacgccagttgaactggtgccgctgttagaggaaaaatctagttggatgagccatgccgcgctggtgtttggtcgcgaagattccgggttgactaacgaagagttagcgttggctgacgttcttactggtgtgccgatggtggcggattatcctagcctcaatctggggcaggcggtgatggtctattgctatcaattagcaacattaatacaacaaccggcgaaaagtgatgcaacggcagaccaacatcaactgcaagctttacgcgaacgagccatgacattgctgacgactctggcagtggcagatgacataaaactggtcgactggttacaacaacgcctggggcttttagagcaacgagacacggcaatgttgcaccgtttgctgcatgatattgaaaaaaatatcaccaaataaaaaacgccttagtaagtatttttc

SEQ ID NO: 9 - protein, 275 aa, Methanomethylophilus sp.1R26
MAEHFTDAQIQRLREYGNGTYKDMEFADVSAREKAFTKLMSDASRDNESALKGMIAHPARQGLSRLMNDIADALVADGFIEVRTPIIISKDALAKMTITPDKPLFKQVFWIDDKRALRPMLAPSLYTVMRSLRDHTDGPVKIFEMGSCFRKESHSGMHLEEFTMLNLVDMGPAGDATESLKKYIGIVMKAAGLPDYQLVHEESDVYKETIDVEINGQEVCSAAVGPHYLDAAHDVHEPWAGAGFGLERLLTIRQGYSTVMKGGASTTYLNGAKMD

SEQ ID NO: 10 - protein, 275 aa, Artificial Sequence
  aaRS with selectivity to CbzK
MAEHFTDAQIQRLREYGNGTYKDMEFADVSAREKAFTKLMSDASRDNESALKGMIAHPARQGLSRLMNDIADALVADGFIEVRTPIIISKDALAKMTITPDKPLFKQVFWIDDKRALRPMLAPSLGTVLRSLRDHTDGPVKIFEMGSCFRKESHSGMHLEEFTMLNLVDMGPAGDATESLKKYIGIVMKAAGLPDYQLVHEESDVYKETIDVEINGQEVCSAAVGPHYLDAAHDVHEPWAGAGFGLERLLTIRQGYSTVMKGGASTTYLNGAKMD

SEQ ID NO: 11 - protein, 275 aa, Artificial Sequence
  aaRS with selectivity to CbzK
MAEHFTDAQIQRLREYGNGTYKDMEFADVSAREKAFTKLMSDASRDNESALKGMIAHPARQGLSRLMNDIADALVADGFIEVRTPIIISKDALAKMTITPDKPLFKQVFWIDDKRALRPMLAPSLYTVARSLRDHTDGPVKIFEMGSCFRKESHSGMHLEEFTMLNLVDMGPAGDATESLKKYIGIVMKAAGLPDYQLVHEESDVFKETIDVEINGQEVCSAAVGPHYLDAAHDVHEPWAGAGFGLERLLTIRQGYSTVMKGGASTTYLNGAKMD

SEQ ID NO: 12 - protein, 275 aa, Artificial Sequence
  aaRS with selectivity to AllocK
MAEHFTDAQIQRLREYGNGTYKDMEFADVSAREKAFTKLMSDASRDNESALKGMIAHPARQGLSRLMNDIADALVADGFIEVRTPIIISKDALAKMTITPDKPLFKQVFWIDDKRALRPMLAPSLYTVMRSLRDHTDGPVKIFEMGSCFRKESHSGMHLEEFTMLQLVDMGPAGDATESLKKYIGIVMKAAGLPDYQLVHEESDVFKETIDVEINGQEVCSAAVGPHYLDAAHDVHEPWAGAGFGLERLLTIRQGYSTVMKGGASTTYLNGAKMD

SEQ ID NO: 13 - protein, 275 aa, Artificial Sequence
  aaRS with selectivity to Bta
MAEHFTDAQIQRLREYGNGTYKDMEFADVSAREKAFTKLMSDASRDNESALKGMIAHPARQGLSRLMNDIADALVADGFIEVRTPIIISKDALAKMTITPDKPLFKQVFWIDDKRALRPMLAPSLYTVMRSLRDHTDGPVKIFEMGSCFRKESHSGMHLEEFTMLSLMDMGPAGDATESLKKYIGIVMKAAGLPDYQLVHEESDVFKETIDVEINGQEVCSAGVGPHYLDAAHDVHEPWAGAGFGLERLLTIRQGYSTVMKGGASTTYLNGAKMD

SEQ ID NO: 14 - protein, 275 aa, Artificial Sequence
  aaRS with selectivity to NMH
MAEHFTDAQIQRLREYGNGTYKDMEFADVSAREKAFTKLMSDASRDNESALKGMIAHPARQGLSRLMNDIADALVADGFIEVRTPIIISKDALAKMTITPDKPLFKQVFWIDDKRALRPMMAPSIFTVARSLRDHTDGPVKIFEMGSCFRKESHSGMHLEEFTMLNLFDMGPAGDATESLKKYIGIVMKAAGLPDYQLVHEESDVYKETIDVEINGQEVCSAAVGPHYLDAAHDVHEPWAGAGFGLERLLTIRQGYSTVMKGGASTTYLNGAKMD

SEQ ID NO: 15 - DNA, 72 bp, Artificial Sequence
  AlvtRNA^NPyl(8)
gggggacggtccggcgaccagcgggtctctaaaacctagccttgcggggttcgacaccccggtctctcgcca

SEQ ID NO: 16 - protein, 323 aa, Archaeoglobus fulgidus
MDITEKLRLITRNAEEVVTEEELRQLIETKEKPRAYVGYEPSGEIHLGHMMTVQKLMDLQEAGFEIIVLLADIHAYLNEKGTFEEIAEVADYNKKVFIALGLDESRAKFVLGSEYQLSRDYVLDVLKMARITTLNRARRSMDEVSRRKEDPMVSQMIYPLMQALDIAHLGVDLAVGGIDQRKIHMLARENLPRLGYSSPVCLHTPILVGLDGQKMSSSKGNYISVRDPPEEVERKIRKAYCPAGVVEENPILDIAKYHILPRFGKIVVERDAKFGGDVEYASFEELAEDFKSGQLHPLDLKIAVAKYLNMLLEDARKRLGVSV

SEQ ID NO: 17 - protein, 323 aa, Artificial Sequence
  aaRS with selectivity to p-I-Phe
MDITEKLRLITRNAEEVVTEEELRQLIETKEKPRAIVGYEPSGEIHLGHMMTVQKLMDLQEAGFEIIVMLADILAYLNEKGTFEEIAEVADYNKKVFIALGLDESRAKFVLGSEYELSRDYVLDVLKMARITTLNRARRSMDEVSRRKEDPMVSQMIYPLMQALTGAHLGVDLAVGGIDQRKIHMLARENLPRLGYSSPVCLHTPILVGLDGQKMSSSKGNYISVRDPPEEVERKIRKAYCPAGVVEENPILDIAKYHILPRFGKIVVERDAKVGGDVEYASFEELAEDFKSGQLHPGRLKIAVAKYLNMLLEDARKRLGVSV

SEQ ID NO: 18 - protein, 323 aa, Artificial Sequence
  aaRS with selectivity to p-Az-Phe
MDITEKLRLITRNAEEVVTEEELRQLIETKEKPRATVGYEPSGEIHLGHMMTVQKLMDLQEAGFEIIVLLADILAYLNEKGTFEEIAEVADYNKKVFIALGLDESRAKFVLGSEYELSRDYVLDVLKMARITTLNRARRSMDEVSRRKEDPMVSQMIYPLMQALTGAHLGVDLAVGGIDQRKIHMLAREKLPRLGYSSPVCLHTPILVGLDGQKMSSSKGNYISVRDPPEEVERKIRKAYCPAGVVEENPILDIAKYHILPRFGKIVVERDAKFGGDVEYASFEELAEDFKSGQLHPLDLKIAVAKYLNMLLEDARKRLGVSV

SEQ ID NO: 19 - protein, 323 aa, Artificial Sequence
  aaRS with selectivity to 0-methyl-tyrosine
MDITEKLRLITRNAEEVVTEEELRQLIETKEKPRAIVGYEPSGEIHLGHMMTVQKLMDLQEAGFEIIVLLADILAYLNEKGTFEEIAEVADYNKKVFIALGLDESRAKFVLGSEYELSRDYVLDVLKMARITTLNRARRSMDEVSRRKEDPMVSQMIYPLMQALTGAHLGVDLAVGGIDQRKIHMLARENLPRLGYSSPVCLHTPILVGLDGQKMSSSKGNYISVRDPPEEVERKIRKAYCPAGVVEENPILDIAKYHILPRFGKIVVERDAKFGGDVEYASFEELAEDFKSGQLHPLDLKIAVAKYLNMLLEDARKRLGVSV

SEQ ID NO: 20 - DNA, 75 bp, Artificial Sequence
  Af-tRNATyr(A01)CUA
cccgccctagctcagaggtagagcgtgcttctctaaaaagcatggtccccggttcaaatcctgggggcgggacca

SEQ ID NO: 21 - protein, 454 aa, Methanosarcina mazeii
MDKKPLNTLISATGLWMSRTGTIHKIKHHEVSRSKIYIEMACGDHLVVNNSRSSRTARALRHHKYRKTCKRCRVSDEDLNKFLTKANEDQTSVKVKVVSAPTRTKKAMPKSVARAPKPLENTEAAQAQPSGSKFSPAIPVSTQESVSVPASVSTSISSISTGATASALVKGNTNPITSMSAPVQASAPALTKSQTDRLEVLLNPKDEISLNSGKPFRELESELLSRRKKDLQQIYAEERENYLGKLEREITRFFVDRGFLEIKSPILIPLEYIERMGIDNDTELSKQIFRVDKNFCLRPMLAPNLYNYLRKLDRALPDPIKIFEIGPCYRKESDGKEHLEEFTMLNFCQMGSGCTRENLESIITDFLNHLGIDFKIVGDSCMVYGDTLDVMHGDLELSSAVVGPIPLDREWGIDKPWIGAGFGLERLLKVKHDFKNIKRAARSESYYNGISTNL

SEQ ID NO: 22 - protein, 454 aa, Artificial Sequence
  aaRS with selectivity to Bpa
MDKKPLNTLISATGLWMSRTGTIHKIKHHEVSRSKIYIEMACGDHLVVNNSRSSRTARALRHHKYRKTCKRCRVSDEDLNKFLTKANEDQTSVKVKVVSAPTRTKKAMPKSVARAPKPLENTEAAQAQPSGSKFSPAIPVSTQESVSVPASVSTSISSISTGATASALVKGNTNPITSMSAPVQASAPALTKSQTDRLEVLLNPKDEISLNSGKPFRELESELLSRRKKDLQQIYAEERENYLGKLEREITRFFVDRGFLEIKSPILIPLEYIERMGIDNDTELSKQIFRVDKNFCLRPMLTPNLYNYLRKLDRALPDPIKIFEIGPCYRKESDGKEHLEEFTMLTFTQMGSGCTRENLESIITDFLNHLGIDFKIVGDSCMVYGDTLDVMHGDLELSSAVVGPIPLDREWGIDKPCIGAGFGLERLLKVKHDFKNIKRAARSESYYNGISTNL

SEQ ID NO: 23 - protein, 454 aa, Artificial Sequence
  aaRS with selectivity to Bta
MDKKPLNTLISATGLWMSRTGTIHKIKHHEVSRSKIYIEMACGDHLVVNNSRSSRTARALRHHKYRKTCKRCRVSDEDLNKFLTKANEDQTSVKVKVVSAPTRTKKAMPKSVARAPKPLENTEAAQAQPSGSKFSPAIPVSTQESVSVPASVSTSISSISTGATASALVKGNTNPITSMSAPVQASAPALTKSQTDRLEVLLNPKDEISLNSGKPFRELESELLSRRKKDLQQIYAEERENYLGKLEREITRFFVDRGFLEIKSPILIPLEYIERMGIDNDTELSKQIFRVDKNFCLRPMLAPNLYNYLRKLDRALPDPIKIFEIGPCYRKESDGKEHLEEFTMLSFMQMGSGCTRENLESIITDFLNHLGIDFKIVGDSCMVFGDTLDVMHGDLELSSAGVGPIPLDREWGIDKPWIGAGFGLERLLKVKHDFKNIKRAARSESYYNGISTNL

SEQ ID NO: 24 - protein, 454 aa, Artificial Sequence
  aaRS with selectivity to CbzK
MDKKPLNTLISATGLWMSRTGTIHKIKHHEVSRSKIYIEMACGDHLVVNNSRSSRTARALRHHKYRKTCKRCRVSDEDLNKFLTKANEDQTSVKVKVVSAPTRTKKAMPKSVARAPKPLENTEAAQAQPSGSKFSPAIPVSTQESVSVPASVSTSISSISTGATASALVKGNTNPITSMSAPVQASAPALTKSQTDRLEVLLNPKDEISLNSGKPFRELESELLSRRKKDLQQIYAEERENYLGKLEREITRFFVDRGFLEIKSPILIPLEYIERMGIDNDTELSKQIFRVDKNFCLRPMLAPNLGNYLRKLDRALPDPIKIFEIGPCYRKESDGKEHLEEFTMLNFCQMGSGCTRENLESIITDFLNHLGIDFKIVGDSCMVYGDTLDVMHGDLELSSAVVGPIPLDREWGIDKPWIGAGFGLERLLKVKHDFKNIKRAARSESYYNGISTNL

SEQ ID NO: 25 - protein, 454 aa, Artificial Sequence
  aaRS with selectivity to CbzK
MDKKPLNTLISATGLWMSRTGTIHKIKHHEVSRSKIYIEMACGDHLVVNNSRSSRTARALRHHKYRKTCKRCRVSDEDLNKFLTKANEDQTSVKVKVVSAPTRTKKAMPKSVARAPKPLENTEAAQAQPSGSKFSPAIPVSTQESVSVPASVSTSISSISTGATASALVKGNTNPITSMSAPVQASAPALTKSQTDRLEVLLNPKDEISLNSGKPFRELESELLSRRKKDLQQIYAEERENYLGKLEREITRFFVDRGFLEIKSPILIPLEYIERMGIDNDTELSKQIFRVDKNFCLRPMLAPNLYNYARKLDRALPDPIKIFEIGPCYRKESDGKEHLEEFTMLNFVQMGSGCTRENLESIITDFLNHLGIDFKIVGDSCMVFGDTLDVMHGDLELSSAVVGPIPLDREWGIDKPWIGAGFGLERLLKVKHDFKNIKRAARSESYYNGISTNL

SEQ ID NO: 26 - protein, 454 aa, Artificial Sequence
  aaRS with selectivity to NMH
MDKKPLNTLISATGLWMSRTGTIHKIKHHEVSRSKIYIEMACGDHLVVNNSRSSRTARALRHHKYRKTCKRCRVSDEDLNKFLTKANEDQTSVKVKVVSAPTRTKKAMPKSVARAPKPLENTEAAQAQPSGSKFSPAIPVSTQESVSVPASVSTSISSISTGATASALVKGNTNPITSMSAPVQASAPALTKSQTDRLEVLLNPKDEISLNSGKPFRELESELLSRRKKDLQQIYAEERENYLGKLEREITRFFVDRGFLEIKSPILIPLEYIERMGIDNDTELSKQIFRVDKNFCLRPMMAPNIFNYARKLDRALPDPIKIFEIGPCYRKESDGKEHLEEFTMLNFFQMGSGCTRENLESIITDFLNHLGIDFKIVGDSCMVYGDTLDVMHGDLELSSAVVGPIPLDREWGIDKPWIGAGFGLERLLKVKHDFKNIKRAARSESYYNGISTNL

SEQ ID NO: 27 - DNA, 72 bp, Methanosarcina mazeii
ggaaacctgatcatgtagatcgaatggactctaaatccgttcagccgggttagattcccggggtttccgcca

SEQ ID NO: 28 - protein, 306 aa, Methanococcus jannaschii
MDEFEMIKRNTSEIISEEELREVLKKDEKSAYIGFEPSGKIHLGHYLQIKKMIDLQNAGFDIIILLADLHAYLNQKGELDEIRKIGDYNKKVFEAMGLKAKYVYGSEFQLDKDYTLNVYRLALKTTLKRARRSMELIAREDENPKVAEVIYPIMQVNDIHYLGVDVAVGGMEQRKIHMLARELLPKKVVCIHNPVLTGLDGEGKMSSSKGNFIAVDDSPEEIRAKIKKAYCPAGVVEGNPIMEIAKYFLEYPLTIKRPEKFGGDLTVNSYEELESLFKNKELHPMDLKNAVAEELIKILEPIRKRL

SEQ ID NO: 29 - protein, 306 aa, Artificial Sequence
  aaRS with selectivity to 3-Nitro-Tyr
MDEFEMIKRNTSEIISEEELREVLKKDEKSAHIGFEPSGKIHLGHYLQIKKMIDLQNAGFDIIILLADLTAYLNQKGELDEIRKIGDYNKKVFEAMGLKAKYVYGSEFQLDKDYTLNVYRLALKTTLKRARRSMELIAREDENPKVAEVIYPIMQVNHAHYRGVDVAVGGMEQRKIHMLARELLPKKVVCIHNPVLTGLDGEGKMSSSKGNFIAVDDSPEEIRAKIKKAYCPAGVVEGNPIMEIAKYFLEYPLTIKRPEKFGGDLTVNSYEELESLFKNKELHPMDLKNAVAEELIKILEPIRKRL

SEQ ID NO: 30 - protein, 306 aa, Artificial Sequence
  aaRS with selectivity to p-Az-Phe
MDEFEMIKRNTSEIISEEELREVLKKDEKSALIGFEPSGKIHLGHYLQIKKMIDLQNAGFDIIIVLADLHAYLNQKGELDEIRKIGDYNKKVFEAMGLKAKYVYGSEWMLDKDYTLNVYRLALKTTLKRARRSMELIAREDENPKVAEVIYPIMQVNGAHYLGVDVAVGGMEQRKIHMLARELLPKKVVCIHNPVLTGLDGEGKMSSSKGNFIAVDDSPEEIRAKIKKAYCPAGVVEGNPIMEIAKYFLEYPLTIKRPEKFGGDLTVNSYEELESLFKNKELHPMDLKNAVAEELIKILEPIRKRL

SEQ ID NO: 31 - DNA, 77 bp, Methanococcus jannaschii
ccggcggtagttcagcagggcagaacggcggactctaaatccgcatggcaggggttcaaatcccctccgccggacca

SEQ ID NO: 32 - protein, 275 aa, Methanomassiliicoccus luminyensis 1
MDTRLTPAQAQRIREMGGTVDPSLAFSSEAERESAFQRISADLQGANLAKIRRCAEAPERHPIGSLENTLACALAAKGFIEVKTPMMIPADGLVKMGIDESHPLWNQVFWVGPKKALRPMLAPNLYFLMRHLRRSVPAPLLLFEIGPCFRKESRGSNHLEEFTMLNLVELAPQADATERLKEHIATVMNAVGLPYELVVEGSEVYGTTIDVEVDGVELASGAVGPLPMDKPHGITEPWAGVGFGLERIALMRTKEQNIKKVGRSLVYVNGARIDI

SEQ ID NO: 33 - protein, 275 aa, Artificial Sequence
  aaRS with selectivity to CbzK
MDTRLTPAQAQRIREMGGTVDPSLAFSSEAERESAFQRISADLQGANLAKIRRCAEAPERHPIGSLENTLACALAAKGFIEVKTPMMIPADGLVKMGIDESHPLWNQVFWVGPKKALRPMLAPNLGFLLRHLRRSVPAPLLLFEIGPCFRKESRGSNHLEEFTMLNLVELAPQADATERLKEHIATVMNAVGLPYELVVEGSEVYGTTIDVEVDGVELASGAVGPLPMDKPHGITEPWAGVGFGLERIALMRTKEQNIKKVGRSLVYVNGARIDI

SEQ ID NO: 34 - protein, 275 aa, Artificial Sequence
  aaRS with selectivity to NMH
MDTRLTPAQAQRIREMGGTVDPSLAFSSEAERESAFQRISADLQGANLAKIRRCAEAPERHPIGSLENTLACALAAKGFIEVKTPMMIPADGLVKMGIDESHPLWNQVFWVGPKKALRPMMAPNIFFLARHLRRSVPAPLLLFEIGPCFRKESRGSNHLEEFTMLNLFELAPQADATERLKEHIATVMNAVGLPYELVVEGSEVYGTTIDVEVDGVELASGAVGPLPMDKPHGITEPWAGVGFGLERIALMRTKEQNIKKVGRSLVYVNGARIDI

SEQ ID NO: 35 - protein, 281 aa, Nitrososphaeria archaeon
MSKIRFTRGQIHRLIELGAEPTELERDFETEAERDKEFNKIAENLARKNLKNIKDFLEQRRKPLVRVIEEKLRTTALRLGFSEVVTPIIIPRLFIKRMGIDEGDPLWKQVMLIDDKRALRPMLAPNLYVLMAKLSNIVRPVKIFEIGPCFRRETGGRYHLEEFTMFNMVELAPEGDPKERLLDYIDTIMRDIGLNYTISVEPSNVYGETLDVVVNGIEVASAAIGPKPIDANWGVREPWIGVGFGVERLAMLVGGYNSIARIAKSLSYLDGSTLSVIKLRW

SEQ ID NO: 36 - protein, 281 aa, Artificial Sequence
  aaRS with selectivity to NMH
MSKIRFTRGQIHRLIELGAEPTELERDFETEAERDKEFNKIAENLARKNLKNIKDFLEQRRKPLVRVIEEKLRTTALRLGFSEVVTPIIIPRLFIKRMGIDEGDPLWKQVMLIDDKRALRPMMAPNIFVLAAKLSNIVRPVKIFEIGPCFRRETGGRYHLEEFTMFNMFELAPEGDPKERLLDYIDTIMRDIGLNYTISVEPSNVYGETLDVVVNGIEVASAAIGPKPIDANWGVREPWIGVGFGVERLAMLVGGYNSIARIAKSLSYLDGSTLSVIKLRW

SEQ ID NO: 37 - protein, 278 aa, Clostridiales bacterium
MENFTITQTERLKQLNCENDVLELEFEDSEARNSKFREIEIGRVKKGKENIKNLLKEKHITISDEVGNKLSDWLMSKDYTKVLTPTIISKDQLKAMTIDEENHLFSQVFWIDNNKCLRPMLAPNLYIVMRELKRITNEPVKIFEIGSCFRKESQGARHMNEFTMLNMVELASVEDGKQLDTLKALAHEAMESLGVESYELVIEESAVYGSTLDIEIDGIEVASGSYGPHELDANWDIFDTWVGIGFGIERLAMAINGGSTIKKYGRSINFIDGETMKL

SEQ ID NO: 38 - protein, 278 aa, Artificial Sequence
  aaRS with selectivity to CbzK
MENFTITQTERLKQLNCENDVLELEFEDSEARNSKFREIEIGRVKKGKENIKNLLKEKHITISDEVGNKLSDWLMSKDYTKVLTPTIISKDQLKAMTIDEENHLFSQVFWIDNNKCLRPMLAPNLGIVLRELKRITNEPVKIFEIGSCFRKESQGARHMNEFTMLNMVELASVEDGKQLDTLKALAHEAMESLGVESYELVIEESAVYGSTLDIEIDGIEVASGSYGPHELDANWDIFDTWVGIGFGIERLAMAINGGSTIKKYGRSINFIDGETMKL

SEQ ID NO: 39 - protein, 278 aa, Artificial Sequence
  aaRS with selectivity to CbzK
MENFTITQTERLKQLNCENDVLELEFEDSEARNSKFREIEIGRVKKGKENIKNLLKEKHITISDEVGNKLSDWLMSKDYTKVLTPTIISKDQLKAMTIDEENHLFSQVFWIDNNKCLRPMLAPNLYIVARELKRITNEPVKIFEIGSCFRKESQGARHMNEFTMLNMVELASVEDGKQLDTLKALAHEAMESLGVESYELVIEESAVFGSTLDIEIDGIEVASGSYGPHELDANWDIFDTWVGIGFGIERLAMAINGGSTIKKYGRSINFIDGETMKL

SEQ ID NO: 40 - protein, 272 aa, Methanonatronarchaeum thermophilum
MEFTVTQKQRLQELGFEGVFPSDFEDVDERNRFFEELVGRLRDRNRKRFERLVGNKIPFWRKVSSDLRNRFYELGFVEVRTPEIISYSLLEKMEISDDLREQVYWLEEDNRCLRPMLAPNLYNELRHFNRISNQSKVRIFEIGTCFRREKSSSEHLNEFTMLNAVEMGDIGDTEERLDRLIEEVFGEFTDYKKVGEESSLYGKTVDVLVDGVEVASCIAGPHPLDSNWSIDQPWVGIGLGVERLAMLLDDGSTAKAYGNSYIYQDGVRLDIK

SEQ ID NO: 41 - protein, 279 aa, Gemmatimonadetes bacterium
MGITWSKTQKDRLRALRADGARLADSFEGRPQRDQAFQDLEGALAKARRKELEDLRAGHGRPGLCRLQTTLEGTLVGAGFVQVATPTIMSRGLLAKMGVTKNHDLFEQVFWLDRDRCLRPMLAPHLYYVIKDLLRLWEKPLGIFEVGSCFRKDSQGARHSNEFTMLNLCEFGLPEEDRGGRLREMAEVVTRAAGVHEYELEESASTVYGGTLDVVSVDGLELGSGAMGPHPLDHAWRITDTWVGIGFGLERLLMTVNRETSIGKMGRSLAYLDGIPLSI

SEQ ID NO: 42 - protein, 277 aa, Peptostreptococcaceae bacterium pGA-8
MQYSNTQRERLVQLNIDASLLEATFEDAEARDASFRSLEKELAKKAKTHLRSLLSSDAVTGSQAVGNTLCSWLQQKGFTRVDTPTIISDKMLDKMSIDDKHHLREQVFWIDRHKCLRPMLAPNLYIVMRELKKTLNTPVKIFEMGSCFRKESQGARHMNEFTMLNFVELATVKDGEQKEYLEKMAREAMAALKIDDYELIIEESTVYGTTVDIEIDGIEVASGAYGPHELDSAWAVFDTWVGIGFGIERLAMAMNGGKTIKRFGRSTNYLDGVPISL

SEQ ID NO: 43 - protein, 277 aa, Desulfosporosinus Sp. 12
MGIIWTPIQKQRLQELNASEAQREMCFESQQARDRAFQEQEHSLVVEGKRRLMELRDIKRRPSLSVLEQQLVEALTQQGFVQVVTPTIISKTSLAKMSVSDDHPLFSQVFWLDSKRCLRPMLAPNLYTLWKDLLRLWEKPIRIFEIGTCYRKESKGSLHLNEFTMLNLTELGLPEDQRHQRLEELASLVMETVGIADYEMELTTSVVYGDTLDVVKGIELGSSAMGPHPLDDQWGIIDPWVGIGFGLERLLMIKEGSQNVQSMGRSLTYLNGVRLNI

SEQ ID NO: 44 - protein, 279 aa, Deltaproteobacteria
MIPWTQTQTQRLNELNAPDSALKKSFDGEPAREKAYQALEKSLVTTQRRRLAEFQTTHRRPELCRLENKLAEMLTQDGFAQVTTPIIMSRGLLKKMSIDSKHPLNSQIFWLQEDKCLRPMLAPHLYYLLVDLLRIWKRPVRIFEIGPCFRKESRGSKHASEFTMLNLVEMGTPENTRRERIQDVGSRVATAAGVKNYRFETVTSEIYGDTIDIVAGKDGLEIASAAMGPHPLDRPWKINESWIGIGFGLERLLMASHRSRNLARFGRSLAYLDGVRLNI

SEQ ID NO: 45 - protein, 281 aa, Deltaproteobacteria
MNSSWTEVQRHRLKELNGAEKDLETAFGDDLQRNRAFQKLEKQLVYQERKRLDRLLDTRFRPLRCELESLLIDALKCEGFTRVETPTIISQNDLERMSIDRSHPFNDQVYRVDSKHCLRPMLAPGLYRLMKDLARIRSGKPVRIFEIGPCFRKETSGARHAGEFTMLNLVEMRIEKGSRRFRIETLAKRIMHAAGIDTYDLVDEPSEVYNTTLDIVCGSDPLEVASCAMGPHPLDAAWGIIDTWVGLGFGLERLLMARENSPGIGKWCKSVSYLDGIRLTL

SEQ ID NO: 46 - DNA, 74 bp, Gemmatimonadetes bacterium
ggggagtggatcgatacaagatcgtgtgggctctaaacccacatagctcggtgtgactccggggctccccacca

SEQ ID NO: 47 - DNA, 73 bp, Artificial Sequence
  Engineered tRNA
ggggggtagatcggattgatcgcgtggactctaaatccgcgctagacgggtgaaactcccgtactcctcgcca

SEQ ID NO: 48 - DNA, 73 bp, Artificial Sequence
  Engineered tRNA
ggggcgtcgatcggattgatcgcgtggactctaaatccgcgcgcaacgggtgaaactcccgtacgcctcgcca

SEQ ID NO: 49 - DNA, 73 bp, Artificial Sequence
  Engineered tRNA
ggggtgttgatcggattgatcgcgtggactctaaatccgcggtagacgggtgaaactcccgtacacctcacca

SEQ ID NO: 50 - DNA, 73 bp, Artificial Sequence
  Engineered tRNA
ggggtgtagatcggattgatcgcgtggactctaaatccgcgaacaacgggtgaaactcccgtacacctcgcca

SEQ ID NO: 51 - DNA, 73 bp, Artificial Sequence
  Engineered tRNA
ggggcgttgatcggattgatcgcgtggactctaaatccgcggccgacgggtgaaactcccgtacacctctcca

SEQ ID NO: 52 - DNA, 73 bp, Artificial Sequence
  Engineered tRNA
ggggggctggtcggggtgaccacggaggctctaaacctcccttagccgggttcaactcccgggtccctcgcca

SEQ ID NO: 53 - DNA, 72 bp, Artificial Sequence
  Engineered tRNA
ggggggctggtcgggtggccaagggggctctaaaccctcggttgccgggttcaactcccgggctccccacca

SEQ ID NO: 54 - DNA, 72 bp, Peptostreptococcaceae bacterium pGA-8
ggggagtggatcgtattgatcgtatggactctaaatccataaagccgagtgagactctcggactcctcgcca

SEQ ID NO: 55 - DNA, 72 bp, Desulfosporosinus Sp. 12
ggggggtagatcggattgatcgcgtggactctaaatccgcgtagacgggtgaaactcccgtactcctcgcca

SEQ ID NO: 56 - DNA, 72 bp, Clostridiales bacterium
ggggaacggatcggatggatcacatagactctaaatctatgtagccgagtgaaactctcgggttcctcgcca

SEQ ID NO: 57 - DNA, 74 bp, Deltaproteobacteria
ggggggtggatcgtaatgagatcgtgtggactctaaatccacatagacgggtgcaactcccgtactccccgcca

SEQ ID NO: 58 - DNA, 73 bp, Deltaproteobacteria
ggggagtggatcggatgagatcgcatgggctctaaacccatgtagccgggtgcgactcccgggcttccctcca

SEQ ID NO: 59 - DNA, 6681 bp, Artificial Sequence
  Mutagensis plasmid
aagaaaccaattgtccatattgcatcagacattgccgtcactgcgtcttttactggctcttctcgctaacccaaccggtaaccccgcttattaaaagcattctgtaacaaagcgggaccaaagccatgacaaaaacgcgtaacaaaagtgtctataatcacggcagaaaagtccacattgattatttgcacggcgtcacactttgctatgccatagcatttttatccataagattagcggatcctacctgacgctttttatcgcaactctctactgtttctccatacccgtttttttggacgcgtacaactcaagtctgacataaatgaccgctatgagcactgcaattacacgccagatcgttctcgctaccgcaaccaccggtatgaaccagattggtgcgcactatgaaggccacaagatcattgagattggtgccgttgaagtggtgaaccgtcgcctgacgggcaataacttccatgtttatctcaaacccgatcggctggtggatccggaagcctttggcgtacatggtattgccgatgaatttttgctcgataagcccacgtttgccgaagtagccgatgagttcatggactatattcgcggcgcggagttggtgatccataacgcagcgttcgatatcggctttatggactacgagttttcgttgcttaagcgcgatattccgaagaccaatactttctgtaaggtcaccgatagccttgcggtggcgaggaaaatgtttcccggtaagcgcaacagcctcgatgcgttatgtgctcgctacgaaatagataacagtaaacgaacgctgcacggggcattactcgatgcccagatccttgcggaagtttatctggcgatgaccggtggtcaaacgtcgatggcttttgcgatggaaggagagacacaacagcaacaaggtgaagcaacaattcagcgcattgtacgtcaggcaagtaagttacgcgttgtttttgcgacagatgaagagattgcagctcatgaagcccgtctcgatctggtgcagaagaaaggcggaagttgcctctggcgagcataatttaatatcagtaaaccggacataacccatgaagaaaaatcgcgcttttttgaagtgggcagggggcaagtatcccctgcttgatgatattaaacggcatttgcccaagggcgaatgtctggttgagccttttgtaggtgccgggtcggtgtttctcaacaccgacttttctcgttatatccttgccgatatcaatagcgacctgatcagtctctataacattgtgaagatgcgtactgatgagtacgtacaggccgcacgcgagctgtttgttcccgaaacaaattgcgccgaggtttactatcagttccgcgaagagttcaacaaaagccaggatccgttccgtcgggcggtactgtttttatatttgaaccgctacggttacaacggcctgtgtcgttacaatctgcgcggtgagtttaacgtgccgttcggccgctacaaaaaaccctatttcccggaagcagagttgtatcacttcgctgaaaaagcgcagaatgcctttttctattgtgagtcttacgccgatagcatggcgcgcgcagatgatgcatccgtcgtctattgcgatccgccttatgcaccgctgtctgcgaccgccaactttacggcgtatcacacaaacagttttacgcttgaacaacaagcgcatctggcggagatcgccgaaggtctggttgagcgccatattccagtgctgatctccaatcacgatacgatgttaacgcgtgagtggtatcagcgcgcaaaattgcatgtcgtcaaagttcgacgcagtataagcagcaacggcggcacacgtaaaaaggtggacgaactgctggctttgtacaaaccaggagtcgtttcacccgcgaaaaaataattcagctaagacactgcactggattaagatgaaaacgattgaagttgatgatgaactctacagctatattgccagccacactaagcatatcggcgagagcgcatccgacattttacggcgtatgttgaaattttccgccgcatcacagcctgctgctccggtgacgaaagaggttcgcgttgcgtcacctgctatcgtcgaagcgaagccggtcaaaacgattaaagacaaggttcgcgcaatgcgtgaacttctgctttcggatgaatacgcagagcaaaagcgagcggtcaatcgctttatgctgctgttgtctacactatattctcttgacgcccaggcgtttgccgaagcaacggaatcgttgcacggtcgtacacgcgtttactttgcggcagatgaacaaacgctgctgaaaaatggtaatcagaccaagccgaaacatgtgccaggcacgccgtattgggtgatcaccaacaccaacaccggccgtaaatgcagcatgatcgaacacatcatgcagtcgatgcaattcccggcggaattgattgagaaggtttgcggaactatctaacggctgaaattaatgaggtcatacccaaatggatagttcgtttacgcccattgaacaaatgctaaaatttcgcgccagccgccacgaagattttccttatcaggagatccttctgactcgtctttgcatgcacatgcaaagcaagctgctggagaaccgcaataaaatgctgaaggctcagggaattaacgagacgttgtttatggcgttgattacgctggagtctcaggaaaaccacagtattcagccttctgaattaagttgtgctcttggatcatcccgtaccaacgcgacgcgtattgccgatgaactggaaaaacgcggttggatcgaacgtcgtgaaagcgataacgatcgccgctgcctgcatctgcaattaacggaaaaaggtcacgagtttttgcgcgaggttttaccaccgcagcataactgcctgcatcaactctggtccgcgctcagcacaacagaaaaagatcagctcgagcaaatcacccgcaaattgctctcccgtctcgaccagatggaacaagacggtgtggttctcgaagcgatgagctaataatacaaaaattaggaggaatttcaacatgacaaatttatctgacatcattgaaaaagaaacaggaaaacaactagtgattcaagaatcaattctaatgttaccagaagaagtagaggaagtaattgggaataaaccagaaagtgatattttagttcatactgcttatgatgaaagtacagatgaaaatgtaatgctattaacttcagatgctccagaatataaaccttgggctttagtaattcaagacagtaatggagaaaataaaattaaaatgttataagtcgagattaagtaaaccggaatctgaagatgaccgacgcggaatacgttcgtatccacgaaaaactggacatctacaccttcaaaaaacagttcttcaacaacaaaaaatctgtttctcaccgttgctacgttctgttcgaactgaaacgtcgtggtgaacgtcgtgcgtgcttctggggttacgcggttaacaaaccgcagtctggtaccgaacgtggtatccacgcggaaatcttctctatccgtaaagttgaagaatacctgcgtgacaacccgggtcagttcaccatcaactggtactcttcttggtctccgtgcgcggactgcgcggaaaaaatcctggaatggtacaaccaggaactgcgtggtaacggtcacaccctgaaaatctgggcgtgcaaactgtactacgaaaaaaacgcgcgtaaccagatcggtctgtggaacctgcgtgacaacggtgttggtctgaacgttatggtttctgaacactaccagtgctgccgtaaaatcttcatccagtcttctcacaaccagctgaacgaaaaccgttggctggaaaaaaccctgaaacgtgcggaaaaacgtcgttctgaactgtctatcatgatccaggttaaaatcctgcacaccaccaaatctccggcggtttaaacttaattaacggcactcctcagccaagtcaaaagcctccggtcggaggcttttgactacatgcccatggcgtttacgccccgccctgccactcatcgcagtactgttgtaattcattaagcattctgccgacatggaagccatcacaaacggcatgatgaacctgaatcgccagcggcatcagcaccttgtcgccttgcgtataatatttgcccatagtgaaaacgggggcgaagaagttgtccatattggccacgtttaaatcaaaactggtgaaactcacccagggattggctgagacgaaaaacatattctcaataaaccctttagggaaataggccaggttttcaccgtaacacgccacatcttgcgaatatatgtgtagaaactgccggaaatcgtcgtggtattcactccagagcgatgaaaacgtttcagtttgctcatggaaaacggtgtaacaagggtgaacactatcccatatcaccagctcaccgtctttcattgccatacggaactccggatgagcattcatcaggcgggcaagaatgtgaataaaggccggataaaacttgtgcttatttttctttacggtctttaaaaaggccgtaatatccagctgaacggtctggttataggtacattgagtaactgactgaaatgcctcaaaatgttctttacgatgccattgggatatatcaacggtggtatatccagtgatttttttctccattttagcttccttagctcctgaaaatctcgataactcaaaaaatacgcccggtagtgatcttatttcattatggtgaaagttggaacctcttacgtgccaagccaaataggccgtcactcggtcgctacgctccgggcgtgagactgcggcgggcgctgcggacacatacaaagttacccacagattccgtggataagcaggggactaacatgtgaggcaaaacagcagggccgcgccggtggcgtttttccataggctccgccctcctgccagagttcacataaacagacgcttttccggtgcatctgtgggagccgtgaggctcaaccatgaatctgacagtacgggcgaaacccgacaggacttaaagatccccaccgtttccggcgggtcgctccctcttgcgctctcctgttccgaccctgccgtttaccggatacctgttccgcctttctcccttacgggaagtgtggcgctttctcatagctcacacactggtatctcggctcggtgtaggtcgttcgctccaagctgggctgtaagcaagaactccccgttcagcccgactgctgcgccttatccggtaactgttcacttgagtccaacccggaaaagcacggtaaaacgccactggcagcagccattggtaactgggagttcgcagaggatttgtttagctaaacacgcggttgctcttgaagtgtgcgccaaagtccggctacactggaaggacagatttggttgctgtgctctgcgaaagccagttaccacggttaagcagttccccaactgacttaaccttcgatcaaaccacctccccaggtggttttttcgtttacagggcaaaagattacgcgcagaaaaaaaggatctcaagaagatcctttgatcttttctactgaaccgctctagatttcagtgcaatttatctcttcaaatgtagcacctgaagtcagcccaggaggaagaggacatccggtcaaataaaacgaaaggctcagtcgaaagactgggcctttcgttttagacttagggaccctttatgacaacttgacggctacatcattcactttttcttcacaaccggcacggaactcgctcgggctggccccggtgcattttttaaatacccgcgagaaatagagttgatcgtcaaaaccaacattgcgaccgacggtggcgataggcatccgggtggtgctcaaaagcagcttcgcctggctgatacgttggtcctcgcgccagcttaagacgctaatccctaactgctggcggaaaagatgtgacagacgcgacggcgacaagcaaacatgctgtgcgacgctggcgatatcaaaattgctgtctgccaggtgatcgctgatgtactgacaagcctcgcgtacccgattatccatcggtggatggagcgactcgttaatcgcttccatgcgccgcagtaacaattgctcaagcagatttatcgccagcagctccgaatagcgcccttccccttgcccggcgttaatgatttgcccaaacaggtcgctgaaatgcggctggtgcgcttcatccgggcgaaagaaccccgtattggcaaatattgacggccagttaagccattcatgccagtaggcgcgcggacgaaagtaaacccactggtgataccattcgcgagcctccggatgacgaccgtagtgatgaatctctcctggcgggaacagcaaaatatcacccggtcggcaaacaaattctcgtccctgatttttcaccaccccctgaccgcgaatggtgagattgagaatataacctttcattcccagcggtcggtcgataaaaaaatcgagataaccgttggcctcaatcggcgttaaacccgccaccagatgggcattaaacgagtatcccggcagcaggggatcattttgcgcttcagccatacttttcatactcccaccattcagag

SEQ ID NO: 60 - protein, 419 aa, Methanosarcina barkeri
MDKKPLDVLISATGLWMSRTGTLHKIKHHEVSRSKIYIEMACGDHLVVNNSRSCRTARAFRHHKYRKTCKRCRVSDEDINNFLTRSTESKNSVKVRVVSAPKVKKAMPKSVSRAPKPLENSVSAKASTNTSRSVPSPAKSTPNSSVPASAPAPSLTRSQLDRVEALLSPEDKISLNMAKPFRELEPELVTRRKNDFQRLYTNDREDYLGKLERDITKFFVDRGFLEIKSPILIPAEYVERMGINNDTELSKQIFRVDKNLCLRPMLAPTLYNYLRKLDRILPGPIKIFEVGPCYRKESDGKEHLEEFTMVNFCQMGSGCTRENLEALIKEFLDYLEIDFEIVGDSCMVYGDTLDIMHGDLELSSAVVGPVSLDREWGIDKPWIGAGFGLERLLKVMHGFKNIKRASRSESYYNGISTNL

SEQ ID NO: 61 - DNA, 72 bp, Artificial Sequence
  Engineered tRNA
  misc_feature (29)..(31): n is a, c, g, or t
gggggacggtccggcgaccagcgggtctnnnaaacctagccttgcggggttcgacaccccggtctctcgcca

SEQ ID NO: 62 - DNA, 75 bp, Artificial Sequence
  Engineered tRNA
  misc_feature (33)..(35): n is a, c, g, or t
cccgccctagctcagaggtagagcgtgcttctnnnaaaagcatggtccccggttcaaatcctgggggcgggacca

SEQ ID NO: 63 - DNA, 72 bp, Artificial Sequence
  Engineered tRNA
  misc_feature (31)..(33): n is a, c, g, or t
ggaaacctgatcatgtagatcgaatggactnnnaatccgttcagccgggttagattcccggggtttccgcca

SEQ ID NO: 64 - DNA, 77 bp, Artificial Sequence
  Engineered tRNA
  misc_feature (35)..(37): n is a, c, g, or t
ccggcggtagttcagcagggcagaacggcggactnnnaatccgcatggcaggggttcaaatcccctccgccggacca

SEQ ID NO: 65 - DNA, 72 bp, Artificial Sequence
  Engineered tRNA
  misc_feature (29)..(31): n is a, c, g, or t
ggcgaactggtccgggaccaccaggcctnnnaagccacggttagccgggttcaactcccgggttcgtcgcca

SEQ ID NO: 66 - DNA, 72 bp, M. intenstinalis
ggcgaactggtccgggaccaccaggcctctaaagccacggttagccgggttcaactcccgggttcgtcgcca

SEQ ID NO: 67 - DNA, 6681 bp, Artificial Sequence
  Recoded mutagensis plasmid
aagaaaccaattgtccatattgcatcagacattgccgtcactgcgtcttttactggctcttctcgctaacccaaccggtaaccccgcttattaaaagcattctgtaacaaagcgggaccaaagccatgacaaaaacgcgtaacaaaagtgtctataatcacggcagaaaagtccacattgattatttgcacggcgtcacactttgctatgccatagcatttttatccataagattagcggatcctacctgacgctttttatcgcaactctctactgtttctccatacccgtttttttggacgcgtacaactcaagtctgacataaatgaccgctatgagcactgcaattacacgccagatcgttctcgctaccgcaaccaccggtatgaaccagattggtgcgcactatgaaggccacaagatcattgagattggtgccgttgaagtggtgaaccgtcgcctgacgggcaataacttccatgtttatctcaaacccgatcggctggtggatccggaagcctttggcgtacatggtattgccgatgaatttttgctcgataagcccacgtttgccgaagtagccgatgagttcatggactatattcgcggcgcggagttggtgatccataacgcagcgttcgatatcggctttatggactacgagtttagcttgcttaagcgcgatattccgaagaccaatactttctgtaaggtcaccgatagccttgcggtggcgaggaaaatgtttcccggtaagcgcaacagcctcgatgcgttatgtgctcgctacgaaatagataacagtaaacgaacgctgcacggggcattactcgatgcccagatccttgcggaagtttatctggcgatgaccggtggtcaaacgagcatggcttttgcgatggaaggagagacacaacagcaacaaggtgaagcaacaattcagcgcattgtacgtcaggcaagtaagttacgcgttgtttttgcgacagatgaagagattgcagctcatgaagcccgtctcgatctggtgcagaagaaaggcggaagttgcctctggcgagcataatttaatatcagtaaaccggacataacccatgaagaaaaatcgcgcttttttgaagtgggcagggggcaagtatcccctgcttgatgatattaaacggcatttgcccaagggcgaatgtctggttgagccttttgtaggtgccgggagcgtgtttctcaacaccgacttttctcgttatatccttgccgatatcaatagcgacctgatcagtctctataacattgtgaagatgcgtactgatgagtacgtacaggccgcacgcgagctgtttgttcccgaaacaaattgcgccgaggtttactatcagttccgcgaagagttcaacaaaagccaggatccgttccgtcgggcggtactgtttttatatttgaaccgctacggttacaacggcctgtgtcgttacaatctgcgcggtgagtttaacgtgccgttcggccgctacaaaaaaccctatttcccggaagcagagttgtatcacttcgctgaaaaagcgcagaatgcctttttctattgtgagtcttacgccgatagcatggcgcgcgcagatgatgcatccgtcgtctattgcgatccgccttatgcaccgctgtctgcgaccgccaactttacggcgtatcacacaaacagttttacgcttgaacaacaagcgcatctggcggagatcgccgaaggtctggttgagcgccatattccagtgctgatctccaatcacgatacgatgttaacgcgtgagtggtatcagcgcgcaaaattgcatgtcgtcaaagttcgacgcagtataagcagcaacggcggcacacgtaaaaaggtggacgaactgctggctttgtacaaaccaggagtcgttagtcccgcgaaaaaataattcagctaagacactgcactggattaagatgaaaacgattgaagttgatgatgaactctacagctatattgccagccacactaagcatatcggcgagagcgcatccgacattttacggcgtatgttgaaattttccgccgcaagtcagcctgctgctccggtgacgaaagaggttcgcgttgcgagtcctgctatcgtcgaagcgaagccggtcaaaacgattaaagacaaggttcgcgcaatgcgtgaacttctgcttagcgatgaatacgcagagcaaaagcgagcggtcaatcgctttatgctgctgttgtctacactatattctcttgacgcccaggcgtttgccgaagcaacggaaagcttgcacggtcgtacacgcgtttactttgcggcagatgaacaaacgctgctgaaaaatggtaatcagaccaagccgaaacatgtgccaggcacgccgtattgggtgatcaccaacaccaacaccggccgtaaatgcagcatgatcgaacacatcatgcagagcatgcaattcccggcggaattgattgagaaggtttgcggaactatctaacggctgaaattaatgaggtcatacccaaatggatagtagctttacgcccattgaacaaatgctaaaatttcgcgccagccgccacgaagattttccttatcaggagatccttctgactcgtctttgcatgcacatgcaaagcaagctgctggagaaccgcaataaaatgctgaaggctcagggaattaacgagacgttgtttatggcgttgattacgctggagtctcaggaaaaccacagtattcagccttctgaattaagttgtgctcttggaagttcccgtaccaacgcgacgcgtattgccgatgaactggaaaaacgcggttggatcgaacgtcgtgaaagcgataacgatcgccgctgcctgcatctgcaattaacggaaaaaggtcacgagtttttgcgcgaggttttaccaccgcagcataactgcctgcatcaactctggtccgcgctcagcacaacagaaaaagatcagctcgagcaaatcacccgcaaattgctctcccgtctcgaccagatggaacaagacggtgtggttctcgaagcgatgagctaataatacaaaaattaggaggaatttcaacatgacaaatttatctgacatcattgaaaaagaaacaggaaaacaactagtgattcaagaaagtattctaatgttaccagaagaagtagaggaagtaattgggaataaaccagaaagtgatattttagttcatactgcttatgatgaaagtacagatgaaaatgtaatgctattaactagtgatgctccagaatataaaccttgggctttagtaattcaagacagtaatggagaaaataaaattaaaatgttataagtcgagattaagtaaaccggaatctgaagatgaccgacgcggaatacgttcgtatccacgaaaaactggacatctacaccttcaaaaaacagttcttcaacaacaaaaaatctgtttctcaccgttgctacgttctgttcgaactgaaacgtcgtggtgaacgtcgtgcgtgcttctggggttacgcggttaacaaaccgcagtctggtaccgaacgtggtatccacgcggaaatcttctctatccgtaaagttgaagaatacctgcgtgacaacccgggtcagttcaccatcaactggtactcttcttggtctccgtgcgcggactgcgcggaaaaaatcctggaatggtacaaccaggaactgcgtggtaacggtcacaccctgaaaatctgggcgtgcaaactgtactacgaaaaaaacgcgcgtaaccagatcggtctgtggaacctgcgtgacaacggtgttggtctgaacgttatggtttctgaacactaccagtgctgccgtaaaatcttcatccagtcttctcacaaccagctgaacgaaaaccgttggctggaaaaaaccctgaaacgtgcggaaaaacgtcgttctgaactgtctatcatgatccaggttaaaatcctgcacaccaccaaatctccggcggtttaaacttaattaacggcactcctcagccaagtcaaaagcctccggtcggaggcttttgactacatgcccatggcgtttacgccccgccctgccactcatcgcagtactgttgtaattcattaagcattctgccgacatggaagccatcacaaacggcatgatgaacctgaatcgccagcggcatcagcaccttgtcgccttgcgtataatatttgcccatagtgaaaacgggggcgaagaagttgtccatattggccacgtttaaatcaaaactggtgaaactcacccagggattggcactgacgaaaaacatattctcaataaaccctttagggaaataggccaggttttcaccgtaacacgccacatcttggctatatatgtgtagaaactgccggaaatcgtcgtggtattcactccagaggctactaaacgtttcagtttgctcatggaaaacggtgtaacaagggtgaacactatcccatatcaccagctcaccgtctttcattgccatacggaactccggatgagcattcatcaggcgggcaagaatgtgaataaaggccggataaaacttgtgcttatttttctttacggtctttaaaaaggccgtaatatccagctgaacggtctggttataggtacattgagtaacactctgaaatgcctcaaaatgttctttacgatgccattgggatatatcaacggtggtatatccagtgatttttttctccattttagcttccttagctcctgaaaatctcgataactcaaaaaatacgcccggtagtgatcttatttcattatggtgaaagttggaacctcttacgtgccaagccaaataggccgtcactcggtcgctacgctccgggcgtgagactgcggcgggcgctgcggacacatacaaagttacccacagattccgtggataagcaggggactaacatgtgaggcaaaacagcagggccgcgccggtggcgtttttccataggctccgccctcctgccagagttcacataaacagacgcttttccggtgcatctgtgggagccgtgaggctcaaccatgaatctgacagtacgggcgaaacccgacaggacttaaagatccccaccgtttccggcgggtcgctccctcttgcgctctcctgttccgaccctgccgtttaccggatacctgttccgcctttctcccttacgggaagtgtggcgctttctcatagctcacacactggtatctcggctcggtgtaggtcgttcgctccaagctgggctgtaagcaagaactccccgttcagcccgactgctgcgccttatccggtaactgttcacttgagtccaacccggaaaagcacggtaaaacgccactggcagcagccattggtaactgggagttcgcagaggatttgtttagctaaacacgcggttgctcttgaagtgtgcgccaaagtccggctacactggaaggacagatttggttgctgtgctctgcgaaagccagttaccacggttaagcagttccccaactgacttaaccttcgatcaaaccacctccccaggtggttttttcgtttacagggcaaaagattacgcgcagaaaaaaaggatctcaagaagatcctttgatcttttctactgaaccgctctagatttcagtgcaatttatctcttcaaatgtagcacctgaagtcagcccaggaggaagaggacatccggtcaaataaaacgaaaggctcagtcgaaagactgggcctttcgttttagacttagggaccctttaactcaacttgacggctacatcattcactttttcttcacaaccggcacggaactcgctcgggctggccccggtgcattttttaaatacccggctgaaatagagttgatcgtcaaaaccaacattgcgaccgacggtggcgataggcatccgggtggtgctcaaaagcagcttcgcctggctgatacgttggtcctcgcgccagcttaagacgctaatccctaactgctggcggaaaagatgactcagacggctcgggctcaagcaaacatgctgtgcgacgctggcgatatcaaaattgctgtctgccaggtgatcgctgatgtactgacaagcctcgcgtacccgattatccatcggtggatggaggctctcgttaatcgcttccatgcgccgcagtaacaattgctcaagcagatttatcgccagcagctcgctatagcgcccttccccttgcccggcgttaatgatttgcccaaacaggtcgctgaaatgcggctggtgcgcttcatccgggcgaaagaaccccgtattggcaaatatactcggccagttaagccattcatgccagtaggcgcgcggacgaaagtaaacccactggtgataccattcgcgagcctccggatgacgaccgtagtgatgaatctctcctggcgggaacagcaaaatatcacccggtcggcaaacaaattctcgtccctgatttttcaccaccccctgaccgcgaatggtgagattgagaatataacctttcattcccagcggtcggtcgataaaaaaatcgagataaccgttggcctcaatcggcgttaaacccgccaccagatgggcattaaagctgtatcccggcagcaggggatcattttgcgcttcagccatacttttcatactcccaccattcagag
